United States Patent Application Publication US 2011/0277190 A1 - sequence listing, part 12

SEQ ID NO: 50616 - protein, 472 aa, Bacillus cereus ATCC 10987
MNHLRGGSEVANKELKRGLEARHIQMIALGGTIGVGLFMGSASTIKWTGPSVMLAYAIAGIFIFFIMRAMGEMLYMEPSTGSFATFGHKYIHPLAGYMTAWSNWFQWVIVGMSEIIAVGAYMQYWFPDLPAWIPGVIAMVILGAANLISVKSFGEFEFWFAMIKIVTILLMIIAGFGLIFFGIGNGGEAIGISNLWSNGGFFTGGFSGFFFALSLVVGAYQGVELIGITAGEAKDPKKTLTRAIQSTIWRILIFYIGAIFVIVTVYPWDQLSTIGSPFVATFAKVGITAAAGLINFVVITAAMSGCNSGIYSAGRMLYTLGVNGQAPKYFTKLSGNGVPLFGTVGVIIGLAIGVVLSYIAPKNLFVYVYSASVLPGMVPWFVILISQINFRKEKGAEMKDHPFKMPFAPVTNYLTIAFLIMVLIGMWFNDDTRISLIVGIIFLAIVTISFYAFGIGKRTPLDVQNDQEISSK

SEQ ID NO: 50617 - protein, 449 aa, Triticum aestivum
MGKEKTHINIVVIGHVDSGKSTTTGHLIYKLGGIDKRVIERFEKEAAEMNKRSFKYAWVLDKLKAERERGITIDIALWKFETTKYYCTVIDAPGHRDFIKNMITGTSQADCAVLIIDSTTGGFEAGISKDGQTREHALLAFTLGVKQMICCCNKMDATTPKYSKARYEEIVKEVSSYLKKVGYNPEKVPFVPISGFEGDNMIERSTNLDWYKGPTLLEALDQINEPKRPSDKPLRLPLQDVYKIGGIGTVPVGRVETGVIKPGMVVTFGPTGLTTEVKSVEMHHESLLEALPGDNVGFNVKNVAVKDLKRGFVASNSKDDPAKEAANFTSQVIIMNHPGQIGNGYAPVLDCHTSHIAVKFAELVTKIDRRSGKEIEAAPKFLKNGDAGIVKMIPTKPMVVETFAIYSPFGPFAGRDMRQTVAVGVIKVVEKKDPTGAQGTKAHSEEMRR

SEQ ID NO: 50618 - protein, 364 aa, Arabidopsis thaliana
MGKGGMSQGEGSKVEEENMAAWLVGINTLKIQPFLLPSVGPHDVRVRMKAVGICGSDVHYLKTMRCADFVVKEPMVIGHECAGIIEEVGEEVKHLVVGDRVALEPGISCWRCNLCREGRYNLCPEMKFFATPPVHGSLANQVVHPADLCFKLPENVSLEEGAMCEPLSVGVHACRRAEVGPETNVLVMGAGPIGLVTMLAARAFSVPRIVIVDVDENRLAVAKQLGADEIVQVTTNLEDVGSEVEQIQKAMGSNIDVTFDCAGFNKTMSTALAATRCGGKVCLVGMGHGIMTVPLTPAAAREVDVVGVFRYKNTWPLCLEFLTSGKIDVKPLITHRFGFSQKEVEDAFETSARGSNAIKVMFNL

SEQ ID NO: 50619 - protein, 384 aa, Lactobacillus plantarum WCFS1
MVLRETDLIPIYQHLHQIPEIGLQEHETQAYLLSIIGKMPQEWLTIKTIPTLDTAILVKVSGLKHDYRIGYRTDIDALPVTENTGLPFASTHPGVMHACGHDIHMSVALGILSYFAENRPATDMVFMFQPAEENASGGQRLYESGALDGDWMPDEIFAFHDNPNLPTGAIGCRMGTLFAGTCEIHAHLSGKSGHAAYPHQANDMVVAGAALVSQLQTIVARNVDPIQSGVVTLGHFTAGTIGNVIAGEAQIDGTIRALTQEMNMHIQRRVRTITEGIALAYDCNIDLKLNQGGYYPVENNDAITADFIKYMQEDDDVNFIETEPAMTGEDFGYLIHQIPGTMFWLGVDSPYSLHSENMVPHTAAIMSGVNAMTSFLTHRNALHK

SEQ ID NO: 50620 - protein, 212 aa, Glycine max
MVSLKLQKRLAASVLKCGRGKVWLDPNEVNEISMANSRQNIRKLVKDGFIIRKPTKIHSRSRARRMKEAKRKGRHSGYGKRKGTREARLPTKILWMRRMRVLRRLLRKYRESKKIDKHMYHDMYMKVKGNVFKNKRVLMESIHKSKAEKAREKTLSDQFEAKRAKNKASRERKNARREERLAQGPGERPPAAQTATPATASQPPQASKKSKK

SEQ ID NO: 50621 - protein, 424 aa, Staphylococcus xylosus
FGTFTVTNDITKYTCASIFAEIGKQTEMFARFSTVAGERGAGDAERDIRGFALKFYTEEGNWDLVGNNTPVFFFRDPKLFPSLNHVVKRNPKTNMKDPQANWDFWTLLPEALHQITILMTDRGIPKGFRNMHGFGSHTYSMYNDKGERFWVKFHHRTQQGIENYTAEEAEQVIAKDRDSSQRDLFNNIEQGNFPKWKMYIQVMTEEQARNHKDNPFDLTKVWYKDEYPLIEVGEFELNRNPENYFQDVEQAAFAPTNIVPGLDFSPDKMLQGRLFSYGDTQRYRLGVNHWQIPVNQPKGVGMENICPFSRDGQMRILDNNQGASTHYYPNSNGAFEDQPQYKKPALDIQGQAYEYDFREDDDNYFEQPGKLFRLLSYEEQQTLFKNTANEMSPVTDALKHRHIRHCYKADSAYGQGVAEAMGID

SEQ ID NO: 50622 - protein, 201 aa, Triticum aestivum
  misc_feature (96)..(96): Xaa can be any naturally occurring amino acid
  misc_feature (199)..(199): Xaa can be any naturally occurring amino acid
  unsure (1)..(201): unsure at all Xaa locations
MVGRSSLPDGALFLGLDSSTQSVKATVLSNELIIVASETVNFDSELPHYKTEGGVYRDPTDDGRIYSPTIMWVEALELLLEKLKPKINFSKVVAVXGSGQQHGSVYWKKGSQAVLSSLDPGKSLVSQLKDAFSTMDSPIWMDSSTTKQCREVENAVGGALELSKLTGSRAYERFTGPQIREIYQTAPHIYENTERISLXSI

SEQ ID NO: 50623 - protein, 461 aa, Staphylococcus xylosus
TAGPRGPLLMQDIYFLEQMAHFDREVIPERRMHAKGSGAFGTFTVTNDITKYTCASIFAEVGKQTEMFARFSTVAGERGAGDAERDIRGFALKFYTDEGNWDLVGNNTPVFFFRDPKLFPSLNHVVKRNPKTNMKDPQANWDFWTLLPEALHQITILMTDRGIPKGFRNMHGFGSHTYSMYNDKGERFWVKFHHRTQQGIENYSAEEAEQVMAKDRDSSQRDLFNNIEQGNFPKWKMYIQVMTEEQARNHKDNPFDLTKVWYKDEYPLIEVGEFELNRNPENYFQDVEQAAFAPTNIVPGLDFSPDKMLQGRLFSYGDTQRYRLGVNHWQIPVNQPKGVGMENICPFSRDGQMRILDNNQGASTHYYPNSNGAFEDQPQYKKPALDIQGQAYEYDFREDDDNYFEQPGKLFRLLSSEEQQILFNNTANEMSPVTDALKHRHIRHCYKADPAYGQGVAEAMG

SEQ ID NO: 50624 - protein, 198 aa, Bradyrhizobium sp. IRBG231
PVPNLRGKTQIKEFSSFPTLEQLPLWGFDGSSTMQAEGHSSDCVLKPVAVYPDAARTNGVLVMCEVMMPDGKTPHPSNARATILDDPDAWFGFEQEYFFYKDGRPLGFPEYGYPAPQGPYYTGVGFKNVGDVARKIVEEHLDLCLAAGINHEGINAEVAKGQWEFQVFGKGSRTAADQMWMARYLMLRLTEKYGIDIE

SEQ ID NO: 50625 - protein, 235 aa, Leuconostoc mesenteroides subsp. mesenteroides ATCC 8293
MSKVLVVDDEKPISDIIKFNLTKEGYDVVTAADGQEALDMYNDENPDLVLLDQMLPEVDGIEVLRQIRSKSDVPVIMVTAKDSEIDKVLGLEMGADDYVTKPFSNRELVARVKANLRSRKSVSQTSEETFNSTEDIHLGDLVIHPQAYMVSKDGADIELTHREFELLYYLAQHIGQVMTREHLLQQVWGYDYFGDVRTVDVTVRRLREKIEDNPSHPNWLATRRGVGYYLRPSEE

SEQ ID NO: 50626 - protein, 198 aa, Bradyrhizobium elkanii
PTPSLRGKTQIKEFASFPTLEQLPLWGFDGSSTQQAEGHSSDCVLKPVACYPDAARENGVLVMCEVMMPDGKTPHPSNKRATILDDDGAWFGFEQEYFFYKDGRPLGFPEEGYPAPQGPYYTGVGYKNVGSVARKIVEEHLNLCLAAGINHEGINAEVAKGQWEFQIFGKGSKTAADQMWMARYLMLRLTESYGIDIE

SEQ ID NO: 50627 - protein, 218 aa, Glycine max
MMGSGDTSSSSDFFCRRHVFLCYKNPAVWPPRIEAAEFDRLPRLLHAAINARKPHIKKETCLTICEGHDGTETSNGDVLIFPDMIRYRRLTHFDVETFVEEVLVKEGEWLPGNPESLKASYVFVCSHGSRDRRCGVFGPILVSRFREEIELHGLQGKVLISSCSHIGGNKYAGNVIIFGSSNNREVTGHLYGYVTPDDVPLLFHQHIIKGEIFDSLWR

SEQ ID NO: 50628 - protein, 638 aa, Alkalilimnicola ehrlichei MLHE-1
MSHASELIAQDIEAYLKQHEQKDLLRFITCGSVDDGKSTLIGRLLHDSQLIYEDQLAAIKRDSGKYGTTGDEVDLALLVDGLQSEREQGITIDVAYRYFSTEKRKFIIADTPGHEQYTRNMATGASTASLAIILVDARKGLQVQTRRHSFIVSLLGIRHVVLAVNKMDLVDYDQAVFDAICKDYQDFVKRLGIPDVHYVPVSALQGDNVVKPSTAMPWYDGPTMMHILETLPVAADRNFDEFRLPVQYVNRPNPDFRGFCGTIASGVVHPGDPVVALPSGKRSRVARIVTWEGDLAEAFPPQAVTLTLEDEIDVSRGDILASPDTVPTVSEAFDARIVWMAEQPMLPGRQYDIKLGTRLVPGTPTAVHHRIDVNSLEHQHAEELGLNEIGYCRVTLNQPVPFDAYERVADTGSFILIDRLTNVTVGAGMIVRPAERAVPEKSDDVVWQEPKISKQQRANQKTQRPAILWFTGLSGSGKSTLSNALEQRLYQLGYHSYLLDGDNIRHGLNGDLGFSREDRVENIRRIGEVARLFVDAGLLVVTAFISPFRADRAMVRELVEDGEFVEIFVDTPLEVCEQRDPKGLYAKARAGVIKEFTGIDSPYEPPEKPELHIRTAELSVDESVERIIAYLQDRHILR

SEQ ID NO: 50629 - protein, 461 aa, Staphylococcus xylosus
TAGPRGPLLMQDIYFLEQMAHFDREVIPERRMHAKGSGAFGTFTVTNDITKYTCASIFAEVGKQTEMFARFSTVAGERGAGDAERDIRGFALKFYTDEGNWDLVGNNTPVFFFRDPKLFPSLNHVVKRNPKTNMKDPQANWDFWTLLPEALHQITILMTDRGIPKGFRNMHGFGSHTYSMYNDKGERFWVKFHHRTHQGIENYSAEEAEQVMAKDRDSSQRDLFNNIEQGNFPKWKMYIQVMTEEQARNHKDNPFDLTKVWYKDEYPLIEVGEFELNRNPENYFQDVEQAAFAPTNIVPGLDFSPDKMLQGRLFSYGDTQRYRLGVNHWQIPVNQPKGVGMENICPFSRDGQMRILDNNQGASTHYYPNSNGAFEDQPQYKKPALDIQGQAYEYDFREDDDNYFEQPGKLFRLLSSEEQQILFNNTANEMSPVTDALKHRHIRHCYKADPAYGQGVAEAMG

SEQ ID NO: 50630 - protein, 438 aa, Bacillus subtilis subsp. subtilis str. 168
MRNGFGKTLSLGIQHVLAMYAGAIVVPLIVGKAMGLTVEQLTYLVSIDIFMCGVATLLQVWSNRFFGIGLPVVLGCTFTAVSPMIAIGSEYGVSTVYGSIIASGILVILISFFFGKLVSFFPPVVTGSVVTIIGITLMPVAMNNMAGGEGSADFGDLSNLALAFTVLSIIVLLYRFTKGFIKSVSILIGILIGTFIAYFMGKVQFDNVSDAAVVQMIQPFYFGAPSFHAAPIITMSIVAIVSLVESTGVYFALGDLTNRRLTEIDLSKGYRAEGLAVLLGGIFNAFPYTAFSQNVGLVQLTGIKKNAVIVVTGVILMAFGLFPKIAAFTTIIPSAVLGGAMVAMFGMVIAYGIKMLSRIDFAKQENLLIVACSVGLGLGVTVVPDIFKQLPSALTLLTTNGIVAGSFTAVVLNIVYNVFSKAKKIEQEADLAEQKTAV

SEQ ID NO: 50631 - protein, 460 aa, Streptomyces avermitilis MA-4680
MAADKIDTIVSLSKRRGFVFPCSEIYGGQKAAWDYGPLGVELKENIKRQWWRYMVTSREDVVGIDSSVILATEVWVASGHVATFSDPLTECTSCHKRYRADHLEEAYEAKHNRSPENGLADINCPNCGNKGQFTEPKQFSGLLSTHLGPTQDSGSVAYLRPETAQGIFTNFAQVQQTSRRKPPFGIAQMGKSFRNEITPGNFIFRTREFEQMEMEFFVKPGEDEKWQEFWMQERWNWYTGLGLREENMRWYDHPAEKLSHYSKRTADIEYRFQFGGNEWGELEGVANRTDYDLSAHAKASGQDLSYFDQEAGERWTPYVIEPAAGVGRAMLAFLLDAYVEDEAPNAKGKMEKRTVLRLDPRLSPVKVAVLPLSRNPELSPKAKGLATALRQHWNIEFDDAGAIGRRYRRQDEIGTPFCVTVDFDTLDDNAVTVRERDSMKQERVSLDQIEGYLAARLIGC

SEQ ID NO: 50632 - protein, 459 aa, Staphylococcus xylosus
MTAGPRGPLLMQDIYFLEQMAHFDREVIPERRMHAKGSGAFGTFTVTNDITKYTCASIFAEVGKQTEMFARFSTVAGERGAGDAERDIRGFALKFYTDEGNWDLVGNNTPVFFFRDPKLFPSLNHVVKRNPKTNMKDPQANWDFWTLLPEALHQITILMTDRGIPKGFRNMHGFGSHTYSMYNDKGERFWVKFHHRTQQGIENYSAEEAEQVMAKDRDSSQRDLFNNIEQGNFPKWKMYIQVMTEEQARNHKDNPFDLTKVWYKDEYPLIEVGEFELNRNPENYFQDVEQAAFAPTNIVPGLDFSPDKMLQGRLFSYGDTQRYRLGVNHWQIPVNQPKGVGMENICPFSRDGQMRILDNNQGASTHYYPNSNGAFEDQPQYKKPALDIQGQAYEYDFREDDDNYFEQPGKLFRLLSSEEQQILFNNTANEMSPVTDALKHRHIRHCYKADPAYGQGVAE

SEQ ID NO: 50633 - protein, 233 aa, Frankia sp. CcI3
MFFGRHKTTLPTPEQALPGRDRPVFAGDVPHTVLGTPLAGPFPAGLETAVFGLGCFWGAERAFWKVPGVYTTAVGYAGGHTPHPTYEEVCSGLTGHTEVVLVVYDPAKVGYEELLRVFWEGHDPTQGMRQGNDTGTQYRSAIYTTTAGQAAAAAASREAFQQVLTAAGLGAITTEIAPAGPFYYAEEYHQQYLSDAKNPGGYCGLGGTGLSICGPWSERESTSEPARTEQAQG

SEQ ID NO: 50634 - protein, 353 aa, Triticum aestivum
MVPSGYDCAASVLLCAEDNAAILGLDDDEEDCSWAAAAATPPRIAADAAAAAEGFLVDHPVQSDECVAALVETEKEHMPADGYPQMLLRRPGALDLAAVRRDAIDWIWEVIEHFNFAPLTAVLSVNYLDRFLSVYPLPEGKAWVTQLLAVACLSLASKMEETYVPLPVDLQVVEANSAFEGRTIKRMELLVLSTLKWRMQAVTACSFIDYFLRKFNDHDAPSMLAFSRSTDLILSTAKGADFLVFRPSEIAASVALAAFGERNTSVVERATTTCKFINKERVLRCYELIQDKVAMGTIVLKSAGSSMFSVPQSPIGVSDAAACLSQQSDDTAVGSPATCYQASSASKRRRIGR

SEQ ID NO: 50635 - protein, 565 aa, Staphylococcus epidermidis ATCC 12228
MLKFHLRLLLLISTITIISFIGLGAIIHNTIYQTLTSNQIKSLDSEARNYVNLFNNNKEKEITNIAHNEKNIILIKEKDKDKIIYSSGNIKDIDHRIDNEANPSKLINKNTKLGMRYTYKNTIDDKTIYISGINNEIIDLQKDLWKYLSIVGVIVLFTVYLASRSINRTYIRPINEVTYATSLLADGYYHVRVPESNVKETRALFVTTNDLARRLQKLNNSQKIQSNRLKTTLENIPSSVLMIDKHGEIVVANHAYYQVFNPDQMVENKSYIGFIDDSIEKLIIESFRTEKVIYEQLEVAINNVHTKYFDVSCIPILTKSKKNLQGMVVVLHDITNLQKLENLRREFVANVSHELKTPITSIKGFAETLIEGAKNDEQSLDMFLNIILKESNRIESLVTDLLDLSHIEQQKELEINYMNLSELAINIIDNLQTQAYNKRIKIQSEIEKDVIIEAHENKIAQVITNLLSNAINYSSEDNKVIVRVYRNDNKVYLEIQDYGIGISETDQKRIFERFYRVDKARSRDSGGTGLGLSITKHIVEAHNGRIDVKSAPGKGSIFKVLFNDN

SEQ ID NO: 50636 - protein, 324 aa, Bacillus subtilis subsp. subtilis str. 168
MKLDAVTFGESMAMFYANEYGGLHEVSTFSKGLAGAESNVACGLARLGFRMGWMSKVGNDQLGTFILQELKKEGVDVSRVIRSQDENPTGLLLKSKVKEGDPQVTYYRKNSAASTLTTAEYPRDYFQCAGHLHVTGIPPALSAEMKDFTYHVMNDMRNAGKTISFDPNVRPSLWPDQATMVHTINDLAGLADWFFPGIAEGELLTGEKTPEGIADYYLKKGASFVAIKLGKEGAYFKTGTSEGFLEGCRVDRVVDTVGAGDGFAVGVISGILDGLSYKDAVQRGNAIGALQVQAPGDMDGLPTREKLASFLSAQRTVHQKKGDY

SEQ ID NO: 50637 - protein, 471 aa, Cucumis sativus
MEDDYSIFPPDSDLDFSFTSTTTDRTFTTSSSARTSLARSSLTLSFNESRLSAAAAALNLRPYHRSDSHWSAIRAATTLSSDGHLHLRHLKLIRHLGTGNLGRVFLCHLRDNDHASFALKVVDKEALSNKKLLQVQTEAEILASLDHPFLPTLYARLDVSHYTCLLIDYCPAGDLHSLLRKQPGSRFSVAAARFFAAEVLVALEYLHALGIVYRDLKPENVLLREDGHVMLSDFDLCFKSDVVPTFHTWTRPGPQATGSCFGWRTSPEFEEEIVGEFVAEPTSAFSKSCVGTHEYLAPELVTGGGHGNGVDWWAFGVFVYELLHGTTPFKGVNKEGTLRNIASSEGVKFRGGGEEEGGMGEARDLIERLLVKDPGRRLGWEKGATEIKRHPFFEGIKWPLIRTYRVPEVYGMMRKGRAQVSHVREVTERIRRRGWWNWRKVMRKRLIKNGSCSKSHSNTNYYSYSSKKKTG

SEQ ID NO: 50638 - protein, 373 aa, Staphylococcus epidermidis ATCC 12228
MAELKRGLEGVIAAETKISSIIDSQLTYAGYDIDDLAENAQFEEIIFLLWNYRLPNENELSELKEKLFDYMTLNNRVYKHFEEYVTDHVHPMTALRTSVSYVAHFDPEAENESDENKYDRAIRIQAKIASLVTAFARVRDGKEPVKPNSELSYAANFLYMLRGELPTEVEVEAFNKALILHADHELNASAFTARCAVSSLSDMYSGVVAAIGSLKGPLHGGANERVMSMLKEIGSIDNVDHYLDERFANKDKIMGFGHRVYKDGDPRAKYLREMSRKITEETGQSELFEMSLAIEKRMKEEKGLIPNVDFFSATVFHSMNIPHDLFTPIFAVSRTSGWIAHILEQYRDNRIMRPRAKYIGEQNRKYVPIEERP

SEQ ID NO: 50639 - protein, 559 aa, Methanosarcina barkeri str. fusaro
MIRKRLHRYAMLKRYGQIIEVLQKYGFGYVVDKIGLSSIRDLTYKFNNKDKANRLNTSGPVRVRKMLEELGPTYIKLGQLLSMRHDLIPPEYAAEFAKLQDEAPSFEFEEVELIVREELGHSIEELFECFEKKPLACASIGQVHRAKIKDGDEVVVKVQRPGIKEVIESDLDIMYSIARLIDEHMPEARLYRPIELVDELSRSILAEIDYTQEGWNADRFAENFRENSQVHIPRVYWDYTNTRVLTLEYIKGIKSSRVDLLDRQGFDRSNIASVVIEAFMQQVFEDGFFHADLHPGNILIMEDGTVAFLDFGMAGHLSSEVCDIFLDGMVALVNGDSSLFVELLRDMGCIDSYADTRSLKEDVESFRSKYYGKALKKLDASTIIEELIGILRDHQVTMPHNIALLVRGIVAVEGFGLITDPDLNFSELLEPYAKNELKKRFYPQNLAHKAYSNISNWTRLFRKAPNKISHILDHAENGYLNIKFESEEGKKLVSEIDVASNRLSISLIISAMIVASSLVIQTHMRPLVWGVPFLGTFSFVIASIFGLWLIYNIFKTGRI

SEQ ID NO: 50640 - protein, 101 aa, Pisum sativum
RKWSFWFDNQSKPKQGAAWGTTLRKVYSFDTVEEFWCLHDQIFKPSKLPGNADFHLFKDGVEPKWEDPLCASGGKWTLTSKGKGNLDTMWLETLMALIGEQ

SEQ ID NO: 50641 - protein, 364 aa, Streptomyces coelicolor A3(2)
MTDVNGAPADVLHTLFHSDQGGHEQVVLCQDRASGLKAVIALHSTALGPALGGTRFYPYASEAEAVADALNLARGMSYKNAMAGLDHGGGKAVIIGDPEQIKSEELLLAYGRFVASLGGRYVTACDVGTYVADMDVVARECRWTTGRSPENGGAGDSSVLTSFGVYQGMRAAAQHLWGDPTLRDRTVGIAGVGKVGHHLVEHLLAEGAHVVVTDVRKDVVRGITERHPSVVAVADTDALIRVENLDIYAPCALGGALNDDTVPVLTAKVVCGAANNQLAHPGVEKDLADRGILYAPDYVVNAGGVIQVADELHGFDFDRCKVKASKIYDTTLAIFARAKEDGIPPAAAADRIAEQRMAEARPRP

SEQ ID NO: 50642 - protein, 606 aa, Mycobacterium avium subsp. paratuberculosis K-10
MTHAPASRPTTLCEAFQATAAKHPDAVALRTLGDATTITWRQYRDRVRAIAAGLAGLGVGNGDTVALMMSNRPEFHLCDTAVLHTGATPFSVYNTNPPELLAYQFDNADNHVVICEGTFMPQVLAAAQQGGTVEHVVCVDGAANGAIGLDQLEASPAAGFDFERSWRAVGPDDVLTIVYTSGTTGPPKGVELTHTNFIENARITEEVGGITHADRAVSYLPDAHAANRWITHYQNLLYGLQITTVGDFKAVLPALTEVRPTLFLGVPRVWIKAKAGLEAAVDAEPAGKRALAKWAFGVGRARARAVSDGRPVGLAEKLRYAFADRLVLSKVRRRLGMDRLRIGVTGAAPIPREVHEFVLGLGIPVCEGYGMTECTAGATVNRPERIKIGMVGTPVPGTEVTVASDGEVLVRGKNVMRGYRKAPEKTAEAIDSDGWLHTGDIGEIDEDGYLRIVDRKKELIINAAGKNMSPTNIENTIAASCPLAGPVVVIGDARAYNTALITLDPDSVTEYAHAHGLSGSLRELVRNPAVRAEIEKGMAAANRRLSRVEQIKRYTVLADVWEPGSQYLTPTAKLKRKPIATGYAAQIDAMYTEQGKRSAGHSAASD

SEQ ID NO: 50643 - protein, 131 aa, Pseudomonas syringae pv. phaseolicola 1448A
MDKLQKTLEEWKEMLDPAQYQVCRLKGTERPFSGKYNETKTEGVYHCICCNEPLFDSTTKFDSGCGWPSFYAPLEGSAVVEVRDVSHGMIRTEVVCAKCDAHLGHVFPDGPPPTGLRYCINSVCLDLVPRQ

SEQ ID NO: 50644 - protein, 133 aa, Bordetella parapertussis 12822
MEKIRKTDAEWRTQLTPEEYAVARQKGTERAFSGRYWDTSTPGIYRCIGCGTPLFASDTKFDAGCGWPSYFEPLAPERVREELDTSHGMVRTEVLCNICDAHLGHVFPDGPEPTGLRYCINSLSLKFEPLEDE

SEQ ID NO: 50645 - protein, 895 aa, Ustilago maydis 521
MPSISPQHTAEPSSSTQSTLHSTPAVSQVRIQTPEAPASLDELLKSPHNPALQIRQPSSTLRGATPDDQRRRNGFHLWRTESEDARNARLRQAIQAAEAQANAPPSLKHRLGNALGKASDWIQSRGFLSLYRLNPIQLGDGTEAILSDAFAVRSPKLSRLGLIVLTISLAGAQLAWTLELAYGTPYLLSLGLSQQSTSLVWLAGPLSGLIAQPVVGSLSDHSTSSFRRRKYMIISALLLTVSTITLAYSVPISTSLVDLFGGGLADWDPRRHDLVHSTTQIISVMAFWILDFALNGLQAASRALILDTAPSEQQTIANAWQGRMTHAGNVVGYLCGWVDLASWKSLRWLGGGQFRRFAMISLLAMISCVSVTISCISESPTDDRFSQSTHQRQSMCTSAWSTAQATLDDVWHAIRRLPRSVRRVCLVQLFAFMGWFPFLFYSTTYILQIAQYERNLEHRRTHDDLILVQPFDAGQGGQAGRPSSDRDAERGSFAMLMFALISLVSAALLPYLALAGEKRDQPCLKNADSNNGQETPTPPLQINIPADRASLWSEPRHTADREHSERISRVQRVTRGLVQGLTLRTFWSVASIVFAALMLVGTAWASTVRQATVVIALVGVPWSVAAWAPFALVGEFVREAEDGASPFEFEQDHWSPARMRARAAATEEGRPRKHSQPSAHESVSRVDQADVGAGGGFKYIDQVSPTRMGRGGEQGARERIRASLVDCAPLPRTSTASSEDVESLHVAPHCGDGGGWRSSSYSSHAPTPQNATGGAGTILGIHNLAIVAPQFVVAIIASLIFSAVHSSLSATHLVLNSPALASLADRDHRVAQGGVVNPAKGTVWVLRFGGSMALIAAVVARFVPLTLSERQRRYPAQQPIQHHAAGQHDDYRDVL

SEQ ID NO: 50646 - protein, 83 aa, Glycine max
  misc_feature (52)..(52): Xaa can be any naturally occurring amino acid
  misc_feature (69)..(69): Xaa can be any naturally occurring amino acid
  unsure (1)..(83): unsure at all Xaa locations
AEADPTIIALLFETRIPYFAESMTYVSRDREITDPMSRPFSFGKESHCGLLXKHMLDDPHLIDMMINAXIRALIEMAMLFKSG

SEQ ID NO: 50647 - protein, 271 aa, Brassica napus
  misc_feature (202)..(202): Xaa can be any naturally occurring amino acid
  misc_feature (261)..(261): Xaa can be any naturally occurring amino acid
  unsure (1)..(271): unsure at all Xaa locations
MANSNKRLNNKVAIITGGARGIGAATARLFTENGAYVIVADILDEEGVRMAESIGGCYVHCDVSKEADVEAAVELAMRRKGRLDVMFNNAGMAVNEGSIMEMDIKMVNKLVSVNVNGVLLGIKHAAKAMIKGGGGSIICTSSSSGVMGGLGGHAYTLSKGAINGLVKTTACELGSHGIRVNSISPHGVPTEILVNAYRTYLXNDRIDAAEVTKTVAEKGSLLTGRAGTVEDVAQAALFLASEESSRFITGHNLVIDGGYTXATTTMRYIYD

SEQ ID NO: 50648 - protein, 113 aa, Brassica napus
  misc_feature (10)..(10): Xaa can be any naturally occurring amino acid
  misc_feature (92)..(92): Xaa can be any naturally occurring amino acid
  unsure (1)..(113): unsure at all Xaa locations
AKGKHYRGVXQRPWGKFAAEIRDPAKFGARVWLGTFEKAEDAALAYDRAAFRMRGSRALLNFPWRVNSGEPDPVRIPSKRSYTSSSSSDKGXPKRRRNTEEVPSELQVKCEVA

SEQ ID NO: 50649 - protein, 295 aa, Halobacterium sp. NRC-1
MSRVVAAGHVNWDVTLRVDALPEPDGEAEIVSQRRSGGGSAANVACALAGFDIDAGLVGSVGDDEHGLLAQRELQAAGVDLAGLRVVDGLETSVKYLLVDSRGEVMVLGNDGANEAVAPGDLDPAVVGADCEHVHLTSQRPATAARLTALAREHDATVSFDPGRRLRDRDYGDALARTDILFVNDNEAGAVLDDDGGPTAPDSDRVVVVKHGSEGATVHTPSGSVTHPGFAVDPVDTTGAGDAFAAGFVAVVLDGGDHERALEFGNACGALAAQHEGARTAPTRADAASFLDSQF

SEQ ID NO: 50650 - protein, 953 aa, Ustilago maydis 521
MKGLKKAMNLSRSKSNDSNGNRSGSAGGGTVPAPPPKGGSVPANPAYQGSLKSTKNGPSSASSSFSSLSSSATSAAPSHAPYNVPVYPTGQGTPQTRLLPHGVNNLADKTPPAPPVVVVDVSSEMPADPIPHSVATASQPSSSITPFHHTGSPGSPPPPGAAMASLSSTGIAASELATPPKAASLTRLRQSPSNSGPKDTIPITSKTPPRKQRSSRFHVTEKVELEKLPHFNEVVPADRPELFVRKLRQCSLVFDFNDASQELEGKQIKAATLHEMLDYITTNRKVITDEIYPEVVAMFSANLFRSIPPQVNPVGDAFDPEEDEPVLELAWPHLQIVYEFFLRFVESPDFNTNIAKKFIDHHFVLQLLELFDSEDPRERDFLKTTLHRIYGKFLNLRAFIRRSINNVFFQFIYETERHNGIAELLEILGSIINGFALPLKEEHKTFLTRVLIPLHKVKSLALYHPQLAYCVVQFLEKDSSLTEEVLLGLLRYWPKVNSPKEVMFLNEVEEILDVIEPSEFVKVEVPLFQQLQRCINSQHFQVAERALYFWNNEYIVNLIGDNVQVILPIVFSSLYQNSKAHWNRTIHGLVYNALKLFMEINPALFEMCTNEYKQQRQMEKQKLIDREEAWKRLRDTAIKNSKAIGVEMPASLKEEQAAPAGSVNPYDLDAFDSAADLTAGADSLFEQMGQGINGEVSTTDFDDVEAHRVAQETSQAQQPDLTREDSVDDMKDFPETARQQVNKQESPHVRRKSVIPMDPTVLAELAGHKSLDGGLMRWVGQRVNAGGGGGFGVGVEVHFDVDELICLPDHVVFGITCSSGVFANMHRPTSLYVTLICLLGTVMSVRAATQRVGDSCSYKQNCQDWAEGVGPDWAKGAITCAVPQDGKPEKCGSGDKKGRDEFSGVCKAVGTLSATEYGCACGVHKADCPETSPFSRIFWPQDWLETAWSQVHH

SEQ ID NO: 50651 - protein, 69 aa, Chlamydomonas sp. HS-5
MDESNATCGKRLDSIGVENTEENRRAYRDLLLSTPGLGQYISGAILFEETLYQCTKDGKTFVQVMNDQG

SEQ ID NO: 50652 - protein, 510 aa, Photorhabdus luminescens subsp. laumondii TTO1
MCGIGGVFNTENRLIDDIENKLQTIMSKIAHRGDPSRFNEKVVRNNFSIATNRLAIVERDSAYQPISNQEHDLHLVLNGQIYNYKSLRNELIKQGYQFKNGGDAEVALIAYICYGKSFIKKLDGMFSFILFDNKNNKFLLGRDHVGIKPLYYTQKEGNWYVASEIKSLIEFNSEIKPVEPGSIFDGLTSEKYISYDTTIPASSDNVEQAKEKIYSLLDNAVRKRVDTDLPVSIMFSGGIDSTIVLYLAKKYHHDITAISFGLPGSKDIEIAQRYCTENNIKHIIYTFTQEELINNIQDAIYYGEFFEQIDAIDSTIAHFGYYIANRLGFKIALCGEGSDEIFAGYDLFKTYPDPHHLSLYRLNNLHRTDLQRVDRASMRNTVEARVPFMDSALVPYVLSLDFSYKLNNGIEKYILREAFRGKIPEYIIDRPKIRMPDGSGVKNTIIDYVKDIKCNLPRNMVDSLNSIGLTHQSSLYFAEKYLSLGYPLPKERFKESGKDFSESGYFNFIS

SEQ ID NO: 50653 - protein, 478 aa, Lycopersicon esculentum
MSGNHRGGGAMAGLIVVLLTVYFTTFSYGSPTILSDLNAPKFRHSRLAKSAIQRQTSNEEQSRLWTPLEHQGWKPCTKSDAASIVVAKILNATLVIPQLEVNPVWQDSSSFEDIFDVDHFINALKDDVAIVKELPDEFSWSTREYYGIAIRPTRIKTAPVHASANWYLENVSPVLQSYGIAAIAPFSHRLTFDNMPKYLQHLRCKVNFQALAFVPHIRQLGDALITRLRFPPSEDNMVSNNYLREVTDLKPKQGVGKFAVLHLRFDKDMAAHSACDFGGGKAENLALAKYRQVIWGGRVINSQFTDEELRSQGRCPLTPEEVGLLLAALGFDNNTRLYLASHKVYGGERRVSALRSLFPLMEDKKSLASSEERALIKGKASLLAAVDYYVGMHSDIFVSASPGNMHNAMVGQRTYNNMKTIRPNMALLGQLFLNKTLTWPEFQESVIEGHQNRQGQIRLRKPKQSLYTYPAPDCMCQA

SEQ ID NO: 50654 - protein, 289 aa, Arabidopsis thaliana
MTGREILHKMKESVKEKVGLGASASSADSGKGKSKMLKQITHGFHLVKGKAFHEIEDYVVAKFKEVDDNELGLFAIFDGHLSHEIPDYLCSHLFENILKEPNFWQEPEKAIKKAYYITDTTILDKADDLGKGGSTAVTAILINCQKLVVANVGDSRAVICQNGVAKPLSVDHEPNMEKDEIENRGGFVSNFPGDVPRVDGQLAVARAFGDKSLKMHLSSEPYVTVEIIDDDAEFLILASDGLWKVMSNQEAVDSIKGIKDAKAAAKHLAEEAVARKSSDDISVVVVKFQ

SEQ ID NO: 50655 - protein, 465 aa, Staphylococcus xylosus
NSMTAGPRGPLLMQDIYFLEQMAHFDREVIPERRMHAKGSGAFGTFTVTNDITKYTCASIFAEVGKQTEMFARFSTVAGERGAGDAERDIRGFALKFYTDEGNWDLVGNNTPVFFFRDPKLFPSLNHVVKRNPKTNMKDPQANWDFWTLLPEALHQITILMTDRGIPKGFRNMHGFGSHTYSMYNDKGERFWVKFHHRTQQGIENYSAEEAEQVMAKDRDSSQRDLFNNIEQGNFPKWKMYIQVMTEEQARNHKDNPFDLTKVWYKDEYPLIEVGEFELNRNPENYFQDVEQAAFAPTNIVPGLDFSPDKMLQGRLFSYGDTQRYRLGVNHWQIPVNQPKGVGMENICPFSRDGQMRILDNNQGASTHYYPNSNGAFEDQPQYKKPALDIQGQAYEYDFREDDDNYFEQPGKLFRLLSSEEQQILFNNTANEMSPVTDALKHRHIRHCYKADPAYGQGVAEAMGI

SEQ ID NO: 50656 - protein, 343 aa, Arabidopsis thaliana
MEKKKVTIPQVCHGHSRPVVDLFYSPITPDGFFLISASKDSHPMLRNGETGDWIGTFEGHKGAVWSSCLDNNALRAASASADFSAKLWDALTGDVLHSFEHKHIVRACAFSEDTKSLLTGGFEKILRVFDMNRLDAPPTEVDKSPGSIRTLTWLHSDQTILSSCTDIGGVRLWDVRSGKIVQTLETKSPVTSAEVSQDGRYITTADGSTVKFWDANHFGLVKSYDMPCNIESASLEPKSGEKFVAGGEDMWVRVFDFYTGEEIGCNKGHHGPVHCVRFTPTGLSYASGSEDGTIRIWQTTPANPEENETSSRRVKHSVDEVSKKIEGFHINKEGKTAEKPSDT

SEQ ID NO: 50657 - protein, 1065 aa, Bacillus anthracis str. 'Ames Ancestor'
MDKKVSAIPQPKTYGPLGNLPLIDKDKPTLSFIKLAEEYGPIFRMQTLSDTIIVVSGHELVAEVCDETRFDKSIEGALAKVRAFAGDGLFTSETQEPNWQKAHNILMPTFSQRAMKDYHAMMVDIAVQLVQKWARLNPNENVDVPEDMTRLTLDTIGLCGFNYRFNSFYRETPHPFITSMTRALDEAMHQLQRLDIEDKLMWRTKRQFQHDIQSMFSLVDNIIAERKSSENQEENDLLSRMLNVQDPETGEKLDDENIRFQIITFLIAGHETTSGLLSFAIYFLLKNPDKLKKAYEEVDRVLTDSTPTYQQVMKLKYIRMILNESLRLWPTAPAFSLYAKEDTVIGGKYPIKKGEDRISVLIPQLHRDKDAWGDNVEEFQPERFEELDKVPHHAYKPFGNGQRACIGMQFALHEATLVMGMLLQHFEFIDYEEYQLDVKQTLTLKPGDFKIRIVPRNQTISHTTVLAPTEEKLKNHEIKQQVQKTPSIIGADNLSLLVLYGSDTGVAEGIARELADTASLEGVQTEVAALNDRIGSLPKEGAVLIVTSSYNGKPPSNAGQFVQWLEELKGDELKGVQYAVFGCGDHNWASTYQRIPRYIDEQMAQKGATRFSTRGEADASGDFEEQLEQWKQRMWSDAMKVFGLELNKNMEKERSTLSLQFVSRLGGSPLARTYEAVYASILENRELQSSSSERSTRHIEISLPEGATYKEGDHLGVLPINSEKNVNRILKRFGLNGKDQVILSASGRSVNHIPLDSPVRLYDLLSYSVEVQEAATRAQIREMVTFTACPPHKKELESLLEDGVYQEQILKKRISMLDLLEKYEACEIRFEPFLELLPALKPRYYSISSSPLVAQDRLSITVGVVNAPAWSGEGTYEGVASNYLAQRHNKDEIICFIRTPQSNFQLPENPETPIIMVGPGTGIAPFRGFLQARRVQKQKGMNVGEAHLYFGCRHPEKDYLYRTELENDERDGLISLHTAFSRLEGQAKTYVQHVIKEDRIHLISLLDNGAHLYICGDGSKMAPDVEDTLCQAYQEIHEVSEQEARNWLDRLQEEGRYGKDVWAGI

SEQ ID NO: 50658 - protein, 579 aa, Oryza sativa
  misc_feature (74)..(74): Xaa can be any naturally occurring amino acid
  misc_feature (82)..(82): Xaa can be any naturally occurring amino acid
  misc_feature (139)..(139): Xaa can be any naturally occurring amino acid
  misc_feature (147)..(147): Xaa can be any naturally occurring amino acid
  misc_feature (156)..(156): Xaa can be any naturally occurring amino acid
  misc_feature (261)..(261): Xaa can be any naturally occurring amino acid
  misc_feature (534)..(534): Xaa can be any naturally occurring amino acid
  misc_feature (542)..(542): Xaa can be any naturally occurring amino acid
  unsure (1)..(579): unsure at all Xaa locations
MASHIVGYPRMGPKRELKFALESFWDGKSSAEDLEKVATDLRASIWKQMADAGIKYIPSNTFSYYDQVLDTSAXMLGAVPEXRYSWTGGEIGFSTYFSMARGNATVPAMEMTKWFDTNYHFIVPELGPNTNFSYSSHKXVNEYKDGXVRSAVDTVXPVLVGPVSYLLLSKPAKGVEKSFALLSLLSSILPVYKEVIAELKAAGATWIQFDEPTLVLDLDSHQLAAFPAAYTELESALSGLNVLIETYFADIPAESYKTLTXSLNSVTAYGFDLIRGAKTLDLIKSAGFPSGKYLFAGVVDGRNIWADDLAASLTTLESLEAIVGKDKLVVSTSCSLMHTAVDLVNETKLDSEIKSWLAFAAQKVVEVNALAKALAGQKDEAYFAANAAAQASRRSSPRVTNEEVQKAAAALKGSDHRRATNVSARLDAQQKKLNLPVLPTTTIGSFPQTVELRRVRREYKAKKISEDEYVSAIKEEISKVVKIQEELDIDVLVHGEPERNDMVEYFGEQLSGFAFTANGWVQSYGSRCVKPPIXIYGDVSRXNAMTVFWSKMAQSMTSRPMKGMLTGPVTILNWSFVRN

SEQ ID NO: 50659 - protein, 457 aa, Staphylococcus xylosus
AGPRGPLLMQDIYFLEQMAHFDREVIPERRMHAKGSGAFGTFTVTNDITKYTCASIFAEVGKQTEMFARFSTVAGERGAGDAERDIRGFALKFYTDEGNWDLVGNNTPVFFFRDPKLFPSLNHVVKRNPKTNMKDPQANWDFWTLLPEALHQITILMTDRGIPKGFRNMHGFGSHTYSMYNDKGERFWVKFHHRTQQGIENYSAEEAEQVMAKDRDSSQRDLFNNIEQGNFPKWKMYIQVMTEEQARNHKDNPFDLTKVWYKDEYPLIEVGEFELNRNPENYFQDVEQAAFAPTNIVPGLDFSPDKMLQGRLFSYGDTQRYRLGVNHWQIPVNQPKGVGMENICPFSRDGQMRILDNNQGASTHYYPNSNGAFEDQPQYKKPALDIQGQAYEYDFREDDDNYFEQPGKLFRLLSSEEQQILFNNTANEMSPVTDALKHRHIRHCYKADPAYGQGVAE

SEQ ID NO: 50660 - protein, 421 aa, Acinetobacter calcoaceticus
MPKEANMASQDYATQRSSLDAQALINDAPLSRYQWLIAIVCFLIVFVDGIDTAAMGFIAPALAQDWGVDRSQLGPVMSAALGGMIIGALVSGPTADRFGRKIVLSMSMLVFGGFTLACAYSTNLDSLVIFRFLTGIGLGAAMPNATTLFSEYCPARIRSLLVTCMFCGYNLGMAIGGFISSWLIPAFGWHSLFLLGGWAPLILMLLVIFFLPESYRFLIVKGKNTKKVRQILSRIAPQKVQGVTEFHVPEEKVEAGTKKGVFGMLFSAKYVKGTVLLWVTYFMGLVMIYLLTSWLPTLMRETGASLERAAFLGGLFQFGGVLSALFIGWAMDRFNPNRIIAGFYLAAGIFAVIVGQSLSNPTLLALFHFMCRYCRQWCSIFNASIECAFLSNAMSCNRCGMDVWNWPFWSPYLVHGLVQFY

SEQ ID NO: 50661 - protein, 455 aa, Staphylococcus xylosus
GPRGPLLMQDIYFLEQMAHFDREVIPERRMHAKGSGAFGTFTVTNDITKYTCASIFAEVGKQTEMFARFSTVAGERGAGDAERDIRGFALKFYTDEGNWDLVGNNTPVFFFRDPKLFPSLNHVVKRNPKTNIKDPQANWDFWTLLPEALHQITILMTDRGIPKGFRNMHGFGSHTYSMYNDKGERFWVKFHHRTQQGIENYSAEEAEQVMAKDRDSSQRDLFNNIEQGNFPKWKMYIQVMTEEQARNHKDNPFDLTKVWYKDEYPLIEVGEFELNRNPENYFQDVEQAAFAPTNIVPGLDFSPDKMLQGRLFSYGDTQRYRLGVNHWQIPVNQPKGVGMENICPFSRDGQMRILDNNQGASTHYYPNSNGAFEDQPQYKKPALDIQGQAYEYDFREDDDNYFEQPGKLFRLLSSEEQQILFNNTANEMSPVTDALKHRHIRHCYKADPAYGQGVA

SEQ ID NO: 50662 - protein, 452 aa, Staphylococcus epidermidis ATCC 12228
MAENLQRELSNRHVQLIAIGGAIGTGLFLGAGQTIAMTGPSILLTYIIIGFMLFMFMRGLGEIIIQNTNFKSFADVTNTYIGPFAGFVTGWTYWLCWIITGMAEVTAVAKYISFWFPDIPNWISALFCVLILMSFNLLSAKLFGELEFWFAIIKIVTIIALIVIGVIMILFAFKTPFGNTSLTHLYQHGIFPKGASGFFMSFQMALFSFVGIEMIGVTAGETKDPEKTIPKAINSVPIRILIFYVGALAVIMSIIPWDKVDPDNSPFVRLFALIGIPFAAGIINFVVLTAAASSCNSGIFSNSRMLYGLSNQNQAPPTFASTNKHGVPHKAIIASSALLLIAALLNYIFPDATLVFTYVTTISTVLFVVVWALIIIAYINYSRKNPELHKKATYKLPGGQYMGYLILIFFVFVFALLFINVDTRRAIYCTPIWFILLGLMYLRYKKADKESR

SEQ ID NO: 50663 - protein, 585 aa, Staphylococcus epidermidis ATCC 12228
MRKTKIVCTIGPASESEEMLEKLMNAGMNVARLNFSHGSHEEHKARIDTIRKVAKRLNKTIGLLLDTKGPEIRTHNMKDGLIVLEKGKEVIVSMNEVEGTPEKFSVTYENLINDVNIGSYILLDDGLVELQVKEINKDKGEVKCDILNTGELKNKKGVNLPGVKVNLPGITDKDADDIRFGIKENVDFIAASFVRRPSDVLDIRQILEEEKAEITIFPKIENQEGIDNIEEILEVSDGLMVARGDMGVEIPPESVPMVQKDLIRKCNKLGKPVITATQMLDSMQRNPRATRAEASDVANAIYDGTDAVMLSGETAAGQYPEEAVKTMRNIAVSAEAAQDYKKLLSDRTKLVETSLVNAIGVSVAHTALNLNVKAIVAATESGSTARTISKYRPHSDIIAVTPSEKTARQCAIVWGVNPVVKEGRKTTDALLNNAVATAVETGRVSNGDLIIITAGVPTGEKGTTNMMKIHLVGDEIAKGQGVGRGSVVGHAIVADSASDLEGKDLSDKVIITNSVDETLVPYVEKAIGLITEENGITSPSAIIGLEKGIPTVVGVEQATKEIKNDMLVTLDASQGKVFEGYANVL

SEQ ID NO: 50664 - protein, 452 aa, Staphylococcus xylosus
GPLLMQDIYFLEQMAHFDREVIPERRMHAKGSGAFGTFTVTNDITKYTCASIFAEVGKQTEMFARFSTVAGERGAGDAERDIRGFALKFYTDEGNWDLVGNNTPVFFFRDPKLFPSLNHVVKRNPKTNIKDPQANWDFWTLLPEALHQITILMTDRGIPKGFRNMHGFGSHTYSMYNDKGERFWVKFHHRTQQGIENYSAEEAEQVMAKDRDSSQRDLFNNIEQGNFPKWKMYIQVMTEEQARNHKDNPFDLTKVWYKDEYPLIEVGEFELNRNPENYFQDVEQAAFAPTNIVPGLDFSPDKMLQGRLFSYGDTQRYRLGVNHWQIPVNQPKGVGMENICPFSRDGQMRILDNNQGASTHYYPNSNGAFEDQPQYKKPALDIQGQAYEYDFREDDDNYFEQPGKLFRLLSSEEQQILFNNTANEMSPVTDALKHRHIRHCYKADPAYGQGVA

SEQ ID NO: 50665 - protein, 545 aa, Heliobacillus mobilis
MAKMTVFNEEARRALEKGVNTLAEAVRVTLGPKGRNVVLEKKFGSPLITNDGVTIAKEIELENPIENMGAQLVKEVATKTNDVAGDGTTTATILAQAIIREGMKNVAAGANPMVIKRGIEKAVATCVEEIKNLSKPVESKEAIAQVASISAADATIGSLIAEAMEKVGKDGVITVEESKGFSTDLEVVEGMNFDRGYISPYMITDPDKMEAVLNDPYILITDKKISAIKDILPVLERIVQSGKQLMIISEDIEGEALATLVVNKLRGTFTCVGVKAPGFGDRRKAMLEDIAILTGGRVVSEEVGLKLENATMDMLGRARQVRISKEETIIVDGAGSQDDIKARIAQIRRQYEESTSEFDKEKLQERLAKLAGGVAVIQVGAATETELKEKKLRIEDALNATRAAVEEGIVPGGGTALVSIQKALDEVEVPAGDEATGVAIIKRSLEEPLRQIANNAGYEGSVVVEKVKNLPKGQGFNAATEVYEDMIAAGIVDPAKVTRSALQNAASIAAMLLTTEAIVADKPEKKEAPGMPGGMPGMGGMDMGM

SEQ ID NO: 50666 - protein, 410 aa, Alkalilimnicola ehrlichei MLHE-1
MTPERQETLTRIGPGTTMGELLRRYWWPLAASVEVRPGRALARRLLGEDLVLFRTPAGGLGLIDEHCTHRGASLRCGHVDEEGIACPYHGWKFDHHGHCLAMPAEPRQKPALLRRAATRGFPVQELGGLVFAYIGPDPAPLLPRYDLLLQDDALRDIGVAELPCNWLQIMENSVDPAHVEWLHGHHLAGVRSERGEPAPTQYLKHHQRIGFDVFEYGIIKRRIVAGGSEEDEDWRTGHPLIFPCALRVGTGNQHRFQFRVPMDDTHTRHYWYACYLPPEGRSAPPQREIPLYPVPWRDEHGDYIVDFVDGGDIMVWVSQGAIADRTRERLVASDKGIVLYRRLLLEQAQRVADGLDPMGVIRDEAENRVIRFAQERNKLGDGRRLLREAIEMSHVRYSPLKEQIIALLQP

SEQ ID NO: 50667 - protein, 767 aa, Nocardia farcinica IFM 10152
MVNVTEGYGSSILGYPRIGPHRELKRALESYWRGSLSREELLEVGRDIQERQFNELAATGLTQVPGNTFSFYDHVLDNALMFGAVPKRFQPYQDVMDPLDFYFLMARGRPDLPPLELVRYINTNYHYRQPELAPDTEFSLHPEALLDEFDRAMAQGIELRPVVLGPASLLLLSKAGDQPGEAEFDTLSLLDKLLPVYEELFEILAKRGATCVQLDEPAYTSERSEAELAAFERAYQRLSKAPLRPRILVTGQYGDFGEALTILAGTGVEAIGLDLASHRIDPDELAKVPGIRRKRLYAGVISGRNVWRADRYVTLEYLNELAKVCPDLVVSTGCTLLHVPYDLLVEYDLEGNVADRLAFAKQKVGEVVSLAKALTEGPSDKWRKRPREVHFKQKHAVRQRVYSITPDMRSREPYAERRAAQQARLNLPPVPATTLGSFPQTGKIRQARYDLDQGRLSYEEYRKRIEAEIEATIRLQEDIGLDVLVHGEHERNDMVQYFAELLDGFATTHFGWVQVYGSRCVRPPIIYGDVSRPAPMSVDWITYAQSLTDKPVKGIVTGPVTMIARSFVRQDQPLYETADQVALAIRDEVVDLEKAGIAIIQVDEPAIREMLPLRAEGRAEYLRWAVGAFRLATSGVRPDTQIHTHIGYSGRTEVVDAIEELDADVTAIVATRSIEWVLKALKEDAAGGHGLSHGVGPGVYESRSARIPDIDELDELLSAAAEAVTPERLWANPDGGLKTRHYWQLEPSLRNMVAAARRIRRRVQAMD

SEQ ID NO: 50668 - protein, 462 aa, Staphylococcus xylosus
TAGPRGPLLMQDIYFLEQMAHFDREVIPERRMHAKGSGAFGTFTVTNDITKYTCASIFAEVGKQTEMFARFSTVAGERGAGDAERDIRGFALKFYTDEGNWDLVGNNTPVFFFRDPKLFPSLNHVVKRNPKTNIKDPQANWDFWTLLPEALHQITILMTDRGIPKGFRNMHGFGSHTYSMYNDKGERFWVKFHHRTHQGIENYSAEEAEQVMAKDRDSSQRDLFNNIEQGNFPKWKMYIQVMTEEQARNHKDNPFDLTKVWYKDEYPLIEVGEFELNRNPENYFQDVEQAAFAPTNIVPGLDFSPDKMLQGRLFSYGDTQRYRLGVNHWQIPVNQPKGVGMENICPFSRDGQMRILDNNQGASTHYYPNSNGAFEDQPQYKKPALDIQGQAYEYDFREDDDNYFEQPGKLFRLLSSEEQQILFNNTANEMSPVTDALKHRHIRHCYKADPAYGQGVAEAMGI

SEQ ID NO: 50669 - protein, 363 aa, Oryza sativa
MMAEALREVLPLPYFPGQPCWYLQERRGAEAWSAEENKVFERALAQVDLDSPNRWEMVAAMLPRKTVIDVMNHYRDLENDVGSIEAGLVPFPHYSSSLSPASSGFTLQDWDGSDGGFRRGCYLKRGRAPDQERKKGVPWTEEEHKSFLMGLKKYGRGDWRNISRYFVTSRTPTQVASHAQKYFIRLNSGGKDKRRSSIHDITTVNLPEEDTSNPSPSPPSVLTTASDQLGSLVDTRPVPPPPSLGAQRHFMSPLPGALGVSHHPYGNVKLEPNASFLAGGDAMRTLVTAVLSGGEPHKEEHRAPPPIISTGTTRLRPSRSPVSVCDWLASWLQSCFMRLRIAKYGTEGPLTGDCFDQEHQVRL

SEQ ID NO: 50670 - protein, 393 aa, Synechococcus elongatus PCC 6301
MGKPRIAMTAVSEFRPGLEGVPATLSSISFVDGQRGVLEYRGISIEQLAQQSSFLETAYLLIWGHLPTQQELTEFEHEIRYHRRIKFRIRDMMKCFPDSGHPMDALQASAAALGLFYSRRALDDPEYIRAAVVRLLAKIPTMVAAFQLIRKGNDPIQPRDELDYAANFLYMLTEREPDPVAARIFDICLTLHAEHTINASTFSAMVTASTLTDPYAVVASAVGTLAGPLHGGANEEVLDMLEAIGSVENVEPYLDHCIATKTRIMGFGHRVYKVKDPRAVILQNLAEQLFDIFGHDPYYEIAVAVEKAAAERLSHKGIYPNVDFYSGLVYRKLGIPSDLFTPVFAIARVAGWLAHWKEQLNENRIFRPTQIYTGSHNLDYTPIADRDLAIESD

SEQ ID NO: 50671 - protein, 663 aa, Haloarcula marismortui ATCC 43049
MHHPGPPRFVATGDEVELAPRDPDPSATYTWRLTQAPKESTVSLGDDPVEHLVPDAPGRYVIRLTAPDGEHDLTVRAFPGRLQPSGTHTSGRSGGHSGVSSGRSGSGHSGSGEYTSARDSGDEDGGGGQPRLTLRPEIEGDEAVVRADCSPHPEGTETAGDLTVEFLLDDRDDIDADAVTRDGTALRIPLDALPDRARIHAVAIGDHGYSVPDAVEFSRDGGGIETVTSGDGVAASRPYDAPAWAEDAVIYEIYVRTFAGESDASPFDAIIDRLDYLDSLGVDAIWLTPVLQNDHAPHGYNITDFFEIASDLGTRADYERFIEAAHDRGFKVLFDLVCNHSARTHPYFESAVEGPDADYREWYEWRSDTEPETYFEWEHIANFNFDHLPVRRHLLDAVAQWAELVDGFRCDMAWAVPNGFWREIHDYCKDRDSEFLLLDETIPYIPDFQAGLFDMHFDSTTYAALRQVGDGGDAEAVLSAIEGRAEIGFPEHASFMLYAENHDETRYIVDYGRDAAEAAAGALFTLPGAPLLYAGQEFGQRGRRDDLAWDHADKALQSFVSDLSATRHDQPALSADADLVRIPYEVRDGPSDRVVAYARATDEDAAVVVLNFGSEPTTVRLPAGTDDTDLVSGEHRGAAGDGGATVTVDSVSVFPADESDLSQ

SEQ ID NO: 50672 - protein, 252 aa, Triticum aestivum
MGRGRIEIKRIENTTSRQVTFCKRRNGLLKKAYELSVLCDAEVALIVFSSRGRLYEYSNNSVKATIDRYKKAHACGSTSGVPLIEVNAQQYYQQEAAKLRHQIQMLQSTNKHLVGDSVGNLSLKELKQLESRLEKGIAKIRARKNELLSSEINYMVKREIELQSDSIDLRTKIAEEEQRLQQVTIARPSVAPELNPFTALDMKCFFPANLFEAAVHAHAQAQAQAQAQASLQLNLGYQQLAPPGAGDVAHQF

SEQ ID NO: 50673 - protein, 333 aa, Oryza sativa
MSAYCGKYKDELIKNAAYIGTPGKGILAADESTGTIGKRFASINVENVEENRRSLRELLFCTPGALQYLSGVILFEETLYQKTKDGKPFVDVLKEGGVLPGIKVDKGTIEVAGTEKETTTQGHDDLGKRCAKYYEAGARFAKWRAVLKIGPNEPSQLAIDLNAQGLARYAIICQENGLVPIVEPEILVDGPHDIDRCAYVSEVVLAACYKALNEHHVLLEGTLLKPNMVTPGSDAKKVSPEVIAEYTVRTLQRTVPAAVPAIVFLSGGQSEEEATLNLNAMNKLSTKKPWSLSFSFGRALQQSTLREPSRQGLQVLICLGRCWLPLEHSAAVA

SEQ ID NO: 50674 - protein, 372 aa, Shewanella sp. ANA-3
MNLSEIAYRRVVVKLGTSVLTSGSKQLDKAHMVELARQMAALMRSGVEVVLCTSGAIAAGREHLQYPELPDTMANKQLLAAVGQSQLILAWAQLFSIYGLHVGQLLLTRADLHDRERYLNARDTLNALLANNIIPIINENDAVATNEIKVGDNDNLSARAALLCDADLLILLTDQKGLFDADPRTNPNAKLISQVEKIDDSLRLLAGGSVSGLGTGGMSTKLEAADIARRAGIEVVIASGHHPDVIKKVVGKESVGTHFSAIENPLESRKQWILAGPAAQGSLVLDAGAVKAVTEKGRSLLSKGIIGVKGEFERGATLQLVDQKGKIIARGITRYCGEALGLIAGKHSDEIESVLGYDYGDAIVHRNDMVVL

SEQ ID NO: 50675 - protein, 257 aa, Listeria monocytogenes str. 1/2a F6854
MIDTSLATQFLGEVIGTAILIILGAGVVAGVSLKRSKAENGGWVVITLAWGLGVTMGVYVSGYMSMAHLNPAVTIGMALAGAFPWNYVLPYILAQFIGAFIGATLIWLHYYPHWKQTEDKPTKLGVFATAPAIRHFTSNFFGEALGTFILVFGLLSLGANSFSDGLNPLVVGALIVAIGMSLGGTTGYAINPARDLGPRIAHFVWPISGKGGSDWGYSWVPVIGPIMGGALGALGYNAIINGELGMWFWVFAALFVL

SEQ ID NO: 50676 - protein, 425 aa, Shewanella sp. ANA-3
MSQTNQAQYLQQLGSQAKQASYALANLSAVQKADLLEAIAEALTQNTQAILAANAKDVAAAKAEGLNDAMIDRLLLNESRLAGIIGDIGDVVRLADPVGEEFGSRVLDNGLRLTRRRVPLGVIGVIYEARPNVTVDIAVLALKTGNAVILRGGKETLESNKLISEVIRGAIASQGLPVDAVQLIDSPDRALVTGLLKLDQYVDMIVPRGGQALQRLCAEQATIPVILGGIGICHLYVDKHADLERALEVIANAKVQRPTVCNALDTLLVDTAVAERFVPQIAEYLHRLGVRFSVCEQSYALLDGLGFDISPATEQSFATEWLSLTLGIKVVSDIDTAIAHIRTYSSGHSEAILTDDIHVATHFMNEVNSAAVYVNASTRFTDGGQFGLGAEVAVSTQKLHARGPMGLEALTTYKWLAWGDYTSRA

SEQ ID NO: 50677 - protein, 159 aa, Arabidopsis thaliana
MGQVFNKLRGKEWRHKQVQAICDRVFDRFKMQTGRANLTFEELYIAVLLVYNDINKRLPGPHFDPPSKDLVNSIMTDCDINLDGELDREEFVKFIEQITAETFNVVSQGLIIALIVAPTVAIATKKATEGVPGVGKVVQKLPTSIYASLVTLAVMAGES

SEQ ID NO: 50678 - protein, 186 aa, Triticum monococcum
MAPIKIGINGFGRIGRLVARVALQSPDVELVAVNDPFITTDYMTYMFKYDTVHGQWKHHEVKVKDSKTLLFGEKEVAVFGCRNPEEIPWAAAGAEYVVESTGVFTDKEKAAAHIKGGAKKVIISAPSKDAPMFVCGVNEKEYKSDIDIVSNASCTTNCLAPLAKVINDRFGIVEGLMTTVHAMTAT

SEQ ID NO: 50679 - protein, 209 aa, Phaseolus lunatus
PESLHMFSFLFDDVGIPQDYRHMDGFGVNTYTLISKAGKPHYVKFHWKATCGEKCLLDEEAVRVGGSNHSHATQDLYDSIAAGNYPEWKLYILTLDPEQEDKFDFDPLDVTKIWPEDVLPLQPVGRMVLNKNIDNFFAENEQLAFCPAIIVPGVYYSDDKLLQTRIFSYADSQRHRLGPNYLQIPANAPKCAHHNNHHEGFMNFMHRDE

SEQ ID NO: 50680 - protein, 226 aa, Triticum aestivum
MATLSVPAAVPAVAEDCEQLRKAFAGWGTNERLIVSILAHRDAAQRRAIRRAYAEAYGEELLRAIGDEIHGKFERAVIQWTLDPAERDAELANEEAKKWQPGGRALVEIACARTPAQLFAAKQAYHDRFKRSLEEDVAAHVTGDFRKLLVPLVSAYRYDGPEVNTSLAHSEAQITPRKGSNEKAYGDDEGSSGFFTTKEARAPRDTTLQNISTSLQRDLSFRSTPL

SEQ ID NO: 50681 - protein, 445 aa, Thermoplasma volcanium GSS1
MPEDVVEKTLKKLDQDKVEFLQMQFTDIVGNVKSLTVPKNRFENALTEGVVFDGSSVAGYAQIEESDMRAIPNLDSYTLLPDEFGKSRVVRFVCNVYSPDGSRFPGDPRYVLEKLLEKVHKEGNEFFVGPEFEFFLFKRDANGNPTTEPSDYGGYFDNTPLDSASDIRQQIVRELYELGYQPEAAHHEVAYGQQEIDLRYAPALKMADRIVMLKSIIKNVAERNGLYASFMPKPINGVNGSGMHIHQSIMSFDEKVNRFYDKNAKYGLSDYAMHYLGGILSHINEGSAILASTVNSYKRLIPGYEAPVYISWANKNRSALIRIPAGEGTRKRMELRCPDPAGNPYLQFAVILGMGLDGIEKKIDPPEPIEKDIFHMTKEERLQEGITSMPESLGEALHHLRNSKLMRDILGDHVYENFLTVKQREWDQFRSYVGEWEIKKYLPTL

SEQ ID NO: 50682 - protein, 850 aa, Candida albicans SC5314
MMKGFKNRLTRNKGQSTNKKTEKKDKEREKEREKPEKRSSSPSSLSLNTSSSSSQSSKNLMTNTSGSLKSNSPSPSRNNSSTSAGSIKSTASNITMTSASSPQGSPSQSSPKIVVNNEEDISGNVFGSPSQPTDNNPSTSSGSTTTGTGTGAASALSPGSSTPLNASANAHTSNVPSISASGPAPSFNLNHPITPTPTSPNSSLGFHNQFEGKATHSQHSAQPHYSQLTPNIASPGKENIDIDLIVTPKRHSSSRFEPTSSDRYQEIVKLPNFDEVLPEEQIQLFIQKIDQCNTMFDFSDPTFDIRGKEIKRITLQELIGFISNNRFTYTDEMYKHVVTMFKKNLFRPIPPPVNPIGDIYDPDEDEPVSELAWPHMQAIYEFFLRFIESPDFQHQVAKQYIDHEFILRILELFDSEDPRERDCLKTTLHRIYGKFLSLRSFIRKSINNVFLQFVYETERFNGIGELLEILGSIINGFALPLKEEHKIFLVRVLIPLHKVKCLSLYHPQLAYCIVQFLEKDPSLTEDVIMGLLRYWPKVNSPKEVMFLNEIEDIFEVMEPNEFIKIQIPLFAQLSKCISSPHFQVSEKVLCYWSNEYFLTLITENAEVVLPIIFASLYELTNATQAGIENGIMNQKLAQFPNATTDANGNLIDNGLVLQDLQQGIAPSMNNPSHPHYNIFQVHASINNNNNNNGNNNNNNDGSINNPDSMNIHTDSNGNEMSDEEYYDSFTGMGGGNGGPGGTNPNNPLGDDFGGAFDDGTGGLLQHNSATSNWNRSIHSLAYGALKVFMDHNPILYDHCTVLYHQSLAEQKQREANRKEGWKRVEELVRQIKNKKNLESQQPQHPASGVI

SEQ ID NO: 50683 - protein, 124 aa, Phaseolus lunatus
EPPTEGRLPDATKGSDHLRDVFGKAMGLSDLDIVALSGGHTIGAAHKERSGFEGPWTSNPLIFDNSYFKELLSGEKEGLLQLPSDKALLTDPVFRPLVEKYAADEDAFFADYAVSHQKLSELGF

SEQ ID NO: 50684 - protein, 148 aa, Gossypium hirsutum
MTEAVIREKPGMASVKDMPLLQDGPPPGGFAPVRYARRIPNKGPSAMAIFLAAFGAFSYGMYQIGQGNKIRRALKEEKFAARRAVLPVLQAEEDERFVKEWRKYLEYEAEVMKDVPGWKVGENVYNSGRWMPPATGELRLKFGDTFFF

SEQ ID NO: 50685 - protein, 131 aa, Oryza sativa
  misc_feature (19)..(19): Xaa can be any naturally occurring amino acid
  misc_feature (102)..(102): Xaa can be any naturally occurring amino acid
  unsure (1)..(131): unsure at all Xaa locations
QPKGSARTSGQTAIAAGFXVASQVMSYQQVKMEEPLPLPYKHQQPPRMLHSGQYFSLPAVHPGDLTPSAIRRYCKAEQVSGKTSALSASRDTGLSTDPNAAXGCAEISSAPTSQPFPEFDDAILGLDDFWN

SEQ ID NO: 50686 - protein, 195 aa, Candida albicans SC5314
MKYIFNRYNALLLRRPLITNMITTGLLVGGGDALAQFFFPNNDNNNLEQQPFDYLRNLRAIIYGSLIFAPIGDKWYKFLNTKVVWTRNAQKPQYQRSMSTLLRVMVDQLVFAPFIGIPLYYSSMTILENRQPFLDNIIDKFNTSWWITLKSNWLVWPLFQFFNFYLLPVQFRLLAVNIISIGWNTYLSYVMHSQK

SEQ ID NO: 50687 - protein, 107 aa, Phaseolus lunatus
NEINLGDYKGRVLIIVNVASQCGLTNSNCTELSQLYEKYKQKGLEILAFPCNQFGAQEPGSNEQIQEFVCTRFKAEFPVFDKVDVNGDKADPLYKYLKSSKGGLFGD

SEQ ID NO: 50688 - protein, 451 aa, Staphylococcus xylosus
GPLLMQDIYFLEQMAHFDREVIPERRMHAKGSGAFGTFTVTNDITKYTCASIFAEVGKQTEMFARFSTVAGERGAGDAERDIRGFALKFYTDEGNWDLVGNNTPVFFFRDPKLFPSLNHVVKRNPKTNMKDPQANWDFWTLLPEALHQITILMTDRGIPKGFRNMHGFGSHTYSMYNDKGERFWVKFHHRTQQGIENYSAEEAEQVMAKDRDSSQRDLFNNIEQGNFPKWKMYIQVMTEEQARNHKDNPFDLTKVWYKDEYPLIEVGEFELNRNPENYFQDVEQAAFAPTNIVPGLDFSPDKMLQGRLFSYGDTQRYRLGVNHWQIPVNQPKGVGMENICPFSRDGQMRILDNNQGASTHYYPNSNGAFEDQPQYKKPALDIQGQAYEYDFREDDDNYFEQPGKLFRLLSSEEQQILFNNTANEMSPVTDALKHRHIRHCYKADPAYGQGV

SEQ ID NO: 50689 - protein, 459 aa, Photorhabdus luminescens subsp. laumondii TTO1
MAGQSQRSTLKRGLKNRHIQLIALGGSVGTGLFLGIAQTIKMAGPSVILGYAIAGFIAFLIMRQLGEMVVEEPVAGSFSHFAYKYWGDFPGFLSGWNYWAMFTLVGMAELTAVGMYIHYWWPDIPTWVSATIFFVLINTVNLINVRLYGETEFWFSIIKVTAIICMIVFGSYLLVSGNGGPQASITNLWQHGGFMPNGISSLIMAMAVIMFSFGGLELVGITAAEAENPRISIPKATNQVVYRILIFYIGSLTVLLSLYPWGNVVEGESPFVMIFHNLDSFWVANILNIVVLTAALSVYNSGVYCNSRMLYGLAKQGNAPEMLTKVNESGVPIRAIVMSALATSIGVLINYVMPGKAFELLMALVVTTLVINWVMICMAHLKFRAEKVKQGIAPSFKAFWYPFGNYLCLVFLAFILVIILMMDSIRISVILMPFWVGVLWLGFLMSHSRRDKMKTEELG

SEQ ID NO: 50690 - protein, 290 aa, Zea mays
MGKDDVVESGAGGGEFAAKDYTDPPPAPLVDAAELGSWSLYRAVIAEFIATLLFLYITVATVIGYKHQTDASASGADAACGGVGVLGIAWAFGGMIFVLVYCTAGISGGHINPAVTFGLFLARKVSLVRALLYIVAQCLGAICGVGLVKAFQSAYFDRYGGGANSLASGYSRGTGLGAEIIGTFVLVYTVFSATDPKRNARDSHVPVLAPLPIGFAVFMVHLATIPVTGTGINPARSLGAAVVYNKDKPWDDHWIFWVGPLLGAAIAAFYHQYILRAGAIKALGSFRSNA

SEQ ID NO: 50691 - protein, 468 aa, Salmonella typhimurium LT2
MDTLQQSPPAEPEGGLRRNLKKRHLLMMSLGGTIGTGLFIGIAEPLSSVGPAGTLLAYLFAGTIMLATMMCLGELSCAFPHSGSFQHYALMFMPSPCWSYTIGWLYWFSWVFSLAADLTAAGFIAHQFFPAVPVYMFCLAILLILTAINLTSAKSFGECEYWLSAIKVFAIVLFICAGGVMIYSLMGHSDWHPTLKTDGMWFPHGWEQIVVYMTIVIYSFQGVELVGNAAGETESPHIILPKVILGIGLRIILFYGLAIAVLALVYPHELTPNGQSPFVWVFSHAGIPGADTLMTLVIFSAAVSAANSAIYASSRMLWSMAGDRFAPACFGKTNGGGVPVYAILITALLALVSLLTRYIPAQQFYLYLIASTGQVGCLAWITIGWCQYRFRQSVRNGTYASDLLRYRSPLFPWTARFVIITNFAIMVGTWFSEQGVVIMLVELAFMIGILLSWYLFRPTLSRLRNTVG

SEQ ID NO: 50692 - protein, 134 aa, Triticum aestivum
  misc_feature (74)..(74): Xaa can be any naturally occurring amino acid
  misc_feature (86)..(86): Xaa can be any naturally occurring amino acid
  misc_feature (92)..(92): Xaa can be any naturally occurring amino acid
  misc_feature (102)..(102): Xaa can be any naturally occurring amino acid
  misc_feature (114)..(114): Xaa can be any naturally occurring amino acid
  misc_feature (116)..(116): Xaa can be any naturally occurring amino acid
  misc_feature (122)..(122): Xaa can be any naturally occurring amino acid
  misc_feature (124)..(124): Xaa can be any naturally occurring amino acid
  unsure (1)..(134): unsure at all Xaa locations
GILMECKIDQKLPYVDLATMIRRQRQAIDEKIRELSNCHIVYSGIDFPKERSWVFQRRLDETKKIPWGLRELGXAPDQVGGIPKHXQHFPPXYTLSRQHFTXLKRCCLKIWAIXAXAWAIPXPXVHLFPNYNYI

SEQ ID NO: 50693 - protein, 404 aa, Glycine max
MDVAVTAFRSPLIILRRPVNESASARFGSTFGFSRKQRFSSVCIPKHKHKQGRRRGFVVRASASSSPESDDAKIAPLQFESSIGQFLSQILKDHPHLVPAAVDQQLQQLQTDRDAHQQNEQPSASTTDLVLYRRIAEVKANERRKALEEILYALVVQKFMDANISLIPSVTPDLSGKVDLWPNEDGKLELLHSHEAYEMIQNHLALILGNRAGDLTSIAEISKFRVGQVYAASVMYGYFLRRVDQRFQLEKTMKVLPNATEKENSAHQTTMDNARPSIEEDTSQVMSHPEVSTWPGGDVRPGGFGYGVKATRLRNYVMSFDGDTLQRYATIRSKEAVSIIEKHTEALFGRPEIVVTPEGAVSKDENIKISFGGLKKLVLEAVTFGSFLWDVESYVDSRYHFVLN

SEQ ID NO: 50694 - protein, 73 aa, Triticum aestivum
MASRSCTFVEILLAVILPPLGVFLRYGCCSMEFLICLLLTILGYIPGIIYAVYVLVAHGSASEESGRDYDALG

SEQ ID NO: 50695 - protein, 913 aa, Oryza sativa
MMSRSYTNLLDLAEGNFAALGPGGGGGGRRRSGSFGLKRMSRVMTVPGTLSELDGEDDSEHAATNSVASDVPSSVAGDRVIVVSNQLPVVARRRPDGRGWSFSWDDDSLLLQLRDGIPDEMEVFFVGSLRAEIPVADQEEVSQALLDRFRCAPVFLPDPLNERFYHRFCKRHLWPLFHYMLPFSSSASPSPSSSSSSSSSPSSSSGSGRFDRGAWEAYVLANKFFFEKVVEVINPEDDYVWVHDYHLMALPTFLRRRFNRLRIGFFLHSPFPSSEIYRTLPVREEILKALLNCDLIGFHTFDYARHFLSCCSRMLGIEYQSKRGYIGLDYFGRTVGIKIMPVGVHMGQLKTVLSLPDREWRVSELQQQFEGKTVLLGVDDMDIFKGINLKLLAFENMLRTHPKWQGRAVLVQIANPARGKGKDLEAIQAEIHESCKRINGEFGQSGYSPVVFIDRDVSSVEKIAYYTIAECVVVTAVRDGMNLTPYEYIVCRQGSDSTSEVNGPKKSMLVVSEFIGCSPSLSGAIRVNPWNIEATAEALNEAISMSEQEKHLRHEKHYRYVSTHDVAYWSKSFIQDLERACKDHFRRTCWGIGLGFGFRVVALDPHFTKLNMDSIVMAYERSESRAIFLDYDGTLVPQTSISRTPSAEVLRIINTLCSDRRNKVFLVSGRRRDKLGEWFSSCPDLGIAAEHGYFLRWTRDEEWQTCTQTSDFGWMEMAKPVMNLYTEATDGSYIDPKESALVWHHQDADPGFGSSQAKELLDHLESVLANEPVSVKSGQFIVEVKPQGVSKGVVAEKILVSMKERGKQADFVLCIGDDRSDEDMFENIADTIKKGMVATNTSLFACTVGQKPSKAKFYLDDTFEVVTMLSALADATEPEPETDLTDEFDELAVSVSSVDIDDEQTPSDKLIGG

SEQ ID NO: 50696 - protein, 280 aa, Arabidopsis thaliana
MGRPPCCDKIGIKKGPWTPEEDIILVSYIQEHGPGNWRSVPTNTGLLRCSKSCRLRWTNYLRPGIKRGNFTPHEEGMIIHLQALLGNKWASIASYLPQRTDNDIKNYWNTHLKKKLNKSDSDERSRSENIALQTSSTRNTINHRSTYASSTENISRLLEGWMRASPKSSTSTTFLEHKMQNRTNNFIDHHSDQFPYEQLQGSWEEGHSKGINGDDDQGIKNSENNNGDDVHHEDGDHEDDDDHNATPPLTFIEKWLLEETSTTGGQMEEMSHLMELSNML

SEQ ID NO: 50697 - protein, 268 aa, Acinetobacter sp. M-1
MRIPQFGLGTFRLKDQAVIDSVKTALEVGYRAIDTAQVYENEAAVGQAIAESGVARQDLFLTTKIWVDNFAEDKFIPSLKDSLQKLRTDAVDLTLIHWPAPALGVSIPSVMQLLLEAKQQGLTKQIGISNFNIALTQQAIDSIGIEHIATNQIELSPYLQNRNLVNYLREQNIDVTSYMTLAYGKVLQDPTLIEIAAQHQATTAQVALAWALQNGFAVIPSSTKRENLISNLKAQDLTLSAEEMQLIAQLERNGREVSPEPFAPEWDK

SEQ ID NO: 50698 - protein, 513 aa, Glycine max
  misc_feature (196)..(196): Xaa can be any naturally occurring amino acid
  unsure (1)..(513): unsure at all Xaa locations
VYKEWPLSKDYIPPDQQRLIFAGKQLEDGRTLADYNIQKESTLHLVLRLRGGMQIFVKTLTGKTITLEVESSDTIDNVKAKIQDKEGIPPDQQRLIFAGKQLEDGRTLADYNIQKESTLHLVLRLRGGMQIFVKTLTGKTITLEVESSDTIDNVKAKIQDKEGIPPDQQRLIFAGKQLEDGRTLADYNIQKEVHPXPNPPFVLRLRGGMQIFVKTLTGKTITLEVESSDTIDNVKAKIQDKEGIPPDQQRLIFAGKQLEDGRTLADYNIQKESTLHLVLRLRGGMQIFVKTLTGKTITLEVESSDTIDNVKAKIQDKEGIPPDQQRLIFAGKQLEDGRTLADYNIQKESTLHLVLRLRGGMQIFVKTLTGKTITLEVESSDTIDNVKAKIQDKEGIPPDQQRLIFAGKQLEDGRTLADYNIQKESTLHLVLRLRGGMQIFVKTLTGKTITLEVESSDTIDNVKAKIQDKEGIPPDQQRLIFAGKQLEDGRTLADYNIQKESTLHLVLRLRGGF

SEQ ID NO: 50699 - protein, 337 aa, Daucus carota
MAPIKIGINGFGRIGRLVARVALQRDDVELVAVNDPFISTDYMTYMFKYDSVHGAWKHHELKVKDEKTLLFGEKPVAVFGCRNPEEIPWASTGAEYIVESTGVFTDKDKAAAHLKGGAKKVIISAPSKDAPMFVVGVNEKEYKSDLHIVSNASCTTNCLAPLAKVINDRFGIVEGLMTTVHSITATQKTVDGPSAKDWRGGRAASFNIIPSSTGAAKAVGKVLPQLNGKLTGMSFRVPTVDVSVVDLTVRLEKKATYDQIKAAIKEESEGKLKGILGYTEDDVVSTDFVGDSRSSIFDAKAGIALNDNFVKLVSWYDNEWGYSTRVVDLIVHMASVQ

SEQ ID NO: 50700 - protein, 203 aa, Glycine max
MGLFLSRNLACKFIYPFLFSNKVSKDLFPKQLENMMSLVSPRTGRHLQRYDKGCRQVVGCIPYRYKNNGTQDKELEVLVISAQKGHGMQFPKGGWETDESMEQAALRETIEEAGVVGSVESKLGKWYYKSKRQPIMHEGYMFPLLVKKELDNWPEMNTRKRRWMTVDEAKVICPYAWMKEALDELVRRQTQLHSKKDGDMSRL

SEQ ID NO: 50701 - protein, 570 aa, Daucus carota
FYAVKCNQDKFVVDDIVKFGSAFRFGLEAGSKPELLLAMSALCKGSPDSFLVCNGFKDAEYITLALIGRKLNFNTVIVLELEEEVDLVIDLSRKLGVRPVIGMRAKLRTKHQGHFGSTSGEKGKFGLTTTQILRVVKKLAQCGMLDCLQLLHFHIGSQIPTTALLADGVGEAAQVYCELVRLGARMGVIDIGGGLGIDYDGSKSPNSDVSVGYTLEEYAAAVVRAIRSVCDRKMVKHPVICSESGRAIVSHHSILVFEAVSASKNSVPQMTSGDLNYLIERLPQDAIVDYQKLSAAAVGGEYETCLHYSDQLKQKCVEQFKDGSFDLEQLAAVDGLCELVYKAIGASDPVRTYHVNLSVFTSIPDFWGIGQLFPIMPIHRLEQKPVVKGILSDLTCDSDGKIEKFIGGEESLPLHELEGSGEGSYYLGMFLGGAYEEALGSIHNLFGGPSVVRVSQSDGPHSFAVTRAVPGPSCADVLRVMQHEPEMMFEELKHRAEEYVLDEGGHGLDHDAIANGLACSFHNMPYLVNSSCSLTAANGNNGYYYSDVDNYSTVTDSDAAEDEQWSYCCA

SEQ ID NO: 50702 - protein, 430 aa, Synechococcus elongatus PCC 6301
MKNVLAIILGGGAGSRLYPLTKQRAKPAVPLAGKYRLIDIPVSNCINADINKIYVLTQFNSASLNRHLSQTYNLSSGFGNGFVEVLAAQITPENPNWFQGTADAVRQYLWLIKEWDVDEYLILSGDHLYRMDYSQFIQRHRDTNADITLSVLPIDEKRASDFGLMKLDGSGRVVEFSEKPKGDELRAMQVDTTILGLDPVAAAAQPFIASMGIYVFKRDVLIDLLSHHPEQTDFGKEVIPAAATRYNTQAFLFNDYWEDIGTIASFYEANLALTQQPSPPFSFYDEQAPIYTRARYLPPTKLLDCQVTQSIIGEGCILKQCTVQNSVLGIRSRIEADCVIQDALLMGADFYETSELRHQNRANGKVPMGIGSGSTIRRAIVDKNAHIGQNVQIVNKDHVEEADREDLGFMIRSGIVVVVKGAVIPDNTVI

SEQ ID NO: 50703 - protein, 489 aa, Haloarcula marismortui ATCC 43049
MSQPDSQTAWDRLYIDGEWRDAGTSETIPVTNPATGDEIAAVPAGTEGDVNDAYQAAEAAQSDWAALSREERNEYVQAMIGVMQERLDEIVELLATESGSVQAKATAEANFAMADFQSALEMVPPEEEVRDSMYHEDKDHHIVREPAGVVGIISPWNFPLHLTTRALGPALALGNTVVIKPATDTPITGGLLLADIAEEAGLPDGVVNVVTGHGSDIGDRMAGHPTARVMSFTGSTAVGRSVASQAGDALALPALELGGNGPFVVTEDADIEAAAKAGSVGAFGHQGQVCISINRHLVHEDVYDEYVEKLVEHAESLTIGNPLDEDVEFGPIINESQVEQLTSFIEQTVDAGATLETGGEVEDLFLEPTVLSECTNDMSAACNEHFGPVAPVIPFESDEEAVELANDTEYGLAAGVYSSDVEHGRSIADQIDAGMVHVNDHPIQDEPNAPFGGMKNSGLGRYNGEWIMDELTETKWISVQHEERDYQLL

SEQ ID NO: 50704 - protein, 247 aa, Trifolium repens
NIAVGTPAEATHPDTLKAGLAELISTFIFVFAGSGSGIAYNKLTDNGAASPAGLISASIAHAFALFVAVSVGANISGGHVNPAVTFGAFVGGNITLFRGIVYIIAQLIGSVLASLLLVFVTASSVPAFALSEGVGIGPALVLEIVMTFGLVYTVYATAVDPKKGNIGIIAPIAIGFIVGANILVGGAFTGASMNPAVSFGPAVVSWSWSNHWIYWAGPLIGGGIAGIIYEVLFISHTGHEQLPTTDY

SEQ ID NO: 50705 - protein, 197 aa, Listeria monocytogenes str. 1/2a F6854
MKKETHGEIRRDLKTRHLSMIAIGGSIGTGLFLASGNAIHTAGPGGALVAYVAIGIMVYFLMTSLGEMATYMPVSGSFSTYASRFVDPAFGFALGWNYWFNWAITLAVDISTAAIIVQFWLPNTPAWLWSAIFLILIFGLNALSVKAYGESEYWFSIIKVATVIIFLIVGVLTIVGILGGEVIGFSNFTAGDAPFKG

SEQ ID NO: 50706 - protein, 340 aa, Mycobacterium avium subsp. paratuberculosis K-10
MEGEALAAIPVIALTGHLGAGKTTLLNHLLRHPGTRIGVIVNDFGDINIDAGLVAGQVDEPASIAGGCICCLPDGGGLDEALGKLADPALRLDAIVVEASGLADPVAIARLIGFSEIRGVRPGGLVDVVDAVNHFDTVDRGPLPPVRYGAASLIVVNKLDQVPERERSVVVQRVRERAAQRNPRIHVVGTIGGRIAPELLFDASARPEQIGQLSFVDLVPEHEHDHVHADAVTAHSDGCIDPDALLNLLENPPPQVFRMKGVVAVRQRATVRNYVVNLVGSAIDIAKAPPKATANRLVAIGMHLDVAAVGARLDRALQPVYGPASGQASRRLQRYLRLSA

SEQ ID NO: 50707 - protein, 466 aa, Glycine max
MAVSAITGARLTLGMSLSSSTRSRTVAMAVSIDPKTDNKLTLTKSEEAFAAAKELMPGGVNSPVRAFKSVGGQPIVIDSVKGSRMWDIDGNEYIDYVGSWGPAIIGHADDQVLAALGETMKKGTSFGAPCLLENTLAELVIDAVPSIEMVRFVNSGTEACMGALRLARAYTGREKIIKFEGCYHGHADPFLVKAGSGVATLGLPDSPGVPKAATFETLTAPYNDTDAVEKLFEANKGEIAAVFLEPVVGNAGFIVPKPDFHNFLRKITKENNTLLVFDEVMTGFRLSYGGAQEYFGITPDITTLGKIIGGGLPVGAYGGRRDIMEKVAPAGPMYQAGTLSGNPLAMTAGIQTLQRIKEPGTYEYLDKITGELVQGIIEAGKRAGHAICGGHIRGMFGFFFTEGPVYNFADAKKSDTAKFARFFWGMLAEGVYLAPSQFEAGFTSLAHTSDDIKKTIAAAEKVFREI

SEQ ID NO: 50708 - protein, 556 aa, Oenococcus oeni PSU-1
MSKKQWFKDTVVYQVYPMSFQDSDNDGIGDLPGITKRLDYIKKLGADVIWLNPIYESPNKDNGYDIANYRAINPEYGSMNDFDDLLNKAHQLNLKIMMDLVVNHTSDQHHWFQESKKTKDNPFSDFYIWRDPVDGHEPNNWLAAFGGSAWTYVPERKQYYLHLFATGQPDLNWENPDVRQAVFDIERFWLDKGVDGFRMDVINLISKPKGLPDVPEPATAGKTMDFVADGHRLNEFLSQMNSEVLSKYDTITVGEMPGSTTEDAIKYTGLNSHELNMVFQFEHVGLSPNPDVRLGKWNDQPVKLTELKASLNRWQTGLDGKGWNSLYWNNHDQPRAVSRFGNDDPKYRVLSAKMLATTLHLMQGTPYVYQGEELGMTNAHFTKLNQYEDIESINFYHELVEQEKIVDGPTMLKYLANISRDNARTPMQWNDKNNAGFSSAKPWFALNPNYKSINVEDSLADKNSVFYYYQKLIKLRHNNEIIKYGSFEEIDPDDDQVYAYRRHYEGKTLLLISNFTDKIVSRDYGQSNASSLLIDNYEDDKVNELRPYEAKAYLFK

SEQ ID NO: 50709 - protein, 471 aa, Oenococcus oeni PSU-1
MNLSHASDSKISADIPLVNKKEKPLIKNTDKEEKHHLPKLRLSTIFAMTFGFFGINMAFSLQSSQLGRIFQTIGANPNNLGFFFILPPLAGMVIQPLIGKYSDRTWNRFGRRMPYLLIGAPAAAIVLILLPNAGSFGFGYASVAALCFGAVATLFMDLTSNICMQPFKMIIGDMVNEDQKDLAWSWQQSFSNLGGVLAAVIPFVLTLVGISNTAPKGEVPLTVKIAFYSAAIILLVTSLLTIIKVHEYDPKTYAQYHEIDLQAQKKSPSLVKLLKDAPRAFWETSVVEFFSWFAILYLWTYATGAISLNVWHTSNASSAGYQAAGNWYGVLTCIMSIAAVIWGIVVQARTKPTSRKFWYSFGLLAGAVGYFMIYFIHNKWLMIIPFCLIGISYLVINTQPFSLLTEALNGQHEGSYLGLFNCSICLPQICASVASFWLFPLMGQSMPAMFLVGGTSLVLGAISVRFVHSRF

SEQ ID NO: 50710 - protein, 244 aa, Candida albicans SC5314
MPTLFHRYNEILRKYPFRSNMITTGIFFGLGDFFAQKLFPHKTIHKEVNDKGEIVETEQVTGYVFDRTARALIYGTFFFAPISVLWHGKTLPKIKNPLINIFKRKKMEQIPHEKKKLHFYDSVFRLGVDQLIFPGLIWIPLYNTVMVLLAQHENPFDVISNKLHNNWWTVLQASWTVWPGFQLFNLYFIPVHLRIVASNIWATGWNGFLSFVHNTKGHGKGSGRKIEELLDIEDDAQEITMVYD

SEQ ID NO: 50711 - protein, 321 aa, Bacillus cereus ATCC 10987
MKALCFEQFGNPDVLQYKELNDPIINPNEILVRTKAIGLNFADIYRRRGDYHLAGNPPYILGYEGAGIVEKVGADVTNIKPGDRIAFADVPFANAELVAVPSKKAIPLPDSISFETAASVLLQGLTAHYLTKDSYEIKQGDIALVHAAAGGVGQLLIQIIKLLGGKVIGLTSAKEKAQIATLSGADHVFLYTEAWPAKVLEITNGTGVNVVYESVGSTLEESFSATKTGGTVVFYGMAGGNPAPVDPRMLMDTSKTLTGGDLWNVLTTFEERKKRSTQLFDWIASGKLNIASPTTFSLQDGARAHELLESRKSTGKILLIP

SEQ ID NO: 50712 - protein, 459 aa, Staphylococcus aureus subsp. aureus MRSA252
MENNELQRGLSARQIQMIALGGTIGVGLFMGATSTIKWTGPSVILAYLIAGIFLFLIMRAMGEMIYLNPTTGSFATFASDYIHPAAGYMTAWSNIFQWIVVGMSEVIAVGEYMKFWFPELPTWIPGVIAILLLMAANLFSVKAFGEFEFWFALIKVVTIILMIIAGFGLIFFGFGNGGHAVGISNLWTNGGFMPNGIVGFFFALSIVIGSYQGVELIGITAGETKDPQKNIVKAVNGVIWRILIFYLGAIFVIVSVYPWNQLGDIGSPFVATFAKIGITFAAGLINFVVLTAAMSGCNSGIFSASRMIYTLAHKGEMPKIFTKIMRNGVPLYTVVAVSLGILIGALLNVILPLYIDGAKSIFVYVYSASILPGMIPWFMILFSHLRFRKLHPEEVEGHPFKMPGGAVSNYLTILFLILVLVGMVFNVETRISVLIGVIFLTIVTIYYFIRYNKNNVKAK

SEQ ID NO: 50713 - protein, 200 aa, Dunaliella tertiolecta
PKWNFDGSSTGQAPADDSEVYLVPRAIYKDPFRMGDNIMVMCETYEPPREKKDGTMNPLKPRPPTRALGCAQPMEKAKPQEPWFDIEQEYTLLNSVTKWPLGWPKGGYPAGQGPYYCSVGAGRSIRRDIPEVHYRSCLHAGIQISGVNGEVLPSQWEYQVGPVEGIAMGDQMWMSRYLMYRVAELFNVEVTFDPKPITGD

SEQ ID NO: 50714 - protein, 933 aa, Escherichia coli O157:H7 EDL933
MFRALALVLWLLIAFSSVFYIVNALHQRESEIRQEFNLSSDQAQRFIQRTSDVMKELKYIAENRLSAENGVLSPRGRETQADVPAFEPLFADSDCSAMSNTWRGSLESLAWFMRYWRDNFSAAYDLNRVFLIGSDNLCMANFGLRDMPVERDTALKALHERINKYRNAPQDDSGSNLYWISEGPRPGVGYFYALTPVYLANRLQALLGVEQTIRMENFFLPGTLPMGVTILDENGHTLISLTGPESKIKADPRWMQERSWFGYTEGFRELVLKKNLPPSSLSIVYSVPVDKVLERIRMLILNAILLNVLAGAALFTLARMYERRIFIPAESDALRLEEHEQFNRKIVASAPVGICILRTADGVNILSNELAHTYLNMLTHEDRQRLTQIICGQQVNFVDVLTSNNTNLQISFVHSRYRNENVAICVLVDVSSRVKMEESLQEMAQAAEQASQSKSMFLATVSHELRTPLYGIIGNLDLLQTKELPKGVDRLVTAMNNSSSLLLKIISDILDFSKIESEQLMIEPREFSPREVMNHITANYLPLVVRKQLGLYCFIEPDVPVALNGDPMRLQQVISNLLSNAIKFTDTGCIVLHVRADGDYLSIRVRDTGVGIPAKEVVRLFDPFFQVGTGVQRNFQGTGLGLAICEKLISMMDGDISVDSEPGMGSQFTVRIPLYGAQYPQKKGVEGLSGKRCWLAVRNASLCQFLETSLQRSGIVVTTYEGQEPTPEDVLITDEVVSKKWQGRAVVTFCRRHIGIPLEKAPGEWVHSVAAPHELPALLARIYLIEMESDDPANALPSTDKAVSDNDDMMILVVDDHPINRRLLADQLGSLGYQCKTANDGVDALNVLSKNHIDIVLSDVNMPNMDGYRLTQRIRQLGLTLPVIGVTANALAEEKQRCLESGMDSCLSKPVTLDVIKQTLTVYAERVRKSRES

SEQ ID NO: 50715 - protein, 207 aa, Pseudomonas syringae pv. tomato str. DC3000
MLKIWGRKNSSNVRKALWIAEEVGVPYETQDAGGAFGLVDEAAYRSKNPNGRIPMIEDGDFVLWESNAIVRYLAARHAPDSDLFPADVQTRASADRWMDWTTSTIAAPFSPVFWGVVRTPPEKQDWPTIEQGIKTLHGLLLVADDALSRQPYLSGETFGMGDIPLGCFAYGWFEMPIERPPLPHLQAWYERLKTRPAYRKAVMSPLT

SEQ ID NO: 50716 - protein, 211 aa, Staphylococcus aureus subsp. aureus MRSA252
MYRAVIFDFDGTIIDTEQHLFNVINKHLEMHNADPISIDFYRSSIGGAATDLHDHLIKAIGSENKDKLYEEHHLTSTTLPMIDTIKSLMAFLKQRHIPMAIATSSVKAEIMPTFKALGLDEYIEVVVGREDVEQVKPDPELYLSAVQQLNYMPTQCLAIEDSVNGATAAIAAGLDVIVNTNKMTSAQDFSNVDYVAKDIDYDQIVARFFTK

SEQ ID NO: 50717 - protein, 154 aa, Streptococcus thermophilus
MLNKIQQRNSDIYSMTPFNFFEDFRRNLFNDFFEDFSHNLFNDLKSNLIKTDIHETDNEYVVEAELPGIPKEDIQVNYENGVLTISGQRQIDAAIEDKKGKLIHSERSLTSVRRQYLLENVKEDEIKASYSDGILKVTLPKDSNKEIKTSIPIE

SEQ ID NO: 50718 - protein, 195 aa, Triticum aestivum
MATMAGRYCCSYSSPSASAPPPHRQRGPPLQPRPTGGRGRGLRRPSLRAVASAAAEPVKAATDAEFFQPADSRPIMLFDGVCNLCNGGVRFVREHDPGRSIRYIPLQSDSGRKLLRRSGRSPDDISSVVLVEKDRSYIKSDAVLRIMEYLNLPFPQLAAFLKIAPLFVRDFAYDNVANNRYVVFGRSETESCEIL

SEQ ID NO: 50719 - protein, 423 aa, Prunus persica
SAKGFFEVTHDISQLTCADFLRAPGVQTPVIVRFSTVIHERGSPETLRDPRGFAVKFYTREGNFDLVGNNFPVFFVRDAMKFPDAIRAFKPNPKSHIQETWRILDFFSHLPESLHTFAFFYDDLGVPQDYRHMEGSSVHAYTLISKAGKVHYVKFHWKPTCGVKCLLEDEAIKVGGANHSHATKDLYDSIAAGNYPEWKLYIQTMDPDHEDRFDFDPLDLTKTWPEDILPLQPVGRLVLNKNIDNFFAENEQLAFNPAHVVPGIYYSDDKMLQTRIFAYSDTQRHRLGPNYLQLPVNAPKCPHHNNHHEGFMNFMHRDEEVNYFPSRHDPVRHAERYPIPSNILSGKREKCVIEKENNFKQPGERYRSWAPDRQERFIHRWVDALSDPRVTHEIRSVWISYWSQADKSLGQKLASRLNVRPSI

SEQ ID NO: 50720 - protein, 393 aa, Solanum tuberosum
MALNINGVSLKSHKMLPFPCSSARSERVFMASTIHRPSVEVGSVKKAFTPPREVHVQVTHSMPPEKIEVFDSLRDWAAQNLLVHLKPVEKCWQPTDFLPDPASEGFDEQVKELRERCKEIPDDYFVVLIGDMITEEALPTYQTMINTLDGVRDETGATVTPWAIWTRAWTAEENRHGDLLNKYLYLSGRVDMKQIEKTIQYLIGSGMDPRTENNPYLGFVYTSLRKGVTFVSHGNTARLAKEHGDMKLAQICGSIAADEKRHETAYTKIVEKLLEVDPDGAVLAIGDMMRKNISMPAHLMYDGRDDNLFEHFSAVAQRLGVYTAKDYADILEFHVGRWEVEKLTGLSSEGRRAQDYVCGLAPRIRKLEERAQARAKHAKSVPFSWIFGKEIKL

SEQ ID NO: 50721 - protein, 650 aa, Photorhabdus luminescens subsp. laumondii TTO1
MDSDILRTSLLIRETEEALLRLYSTGELHGTVHTCIGQELTGAIVCKFLKKNDWVFSNHRCHGHFLSRTGDVTGLIAEVMGKETGVCGGRGGSQHLCKEGFFSNGIQGGILPVATGAAFAKKLRHDNSISIAFIGDGTLGEGVVYEVLNIAAKWDLPLLIVLENNQYAQSTHISETLSGSISKRAQAFGMRYTKSDVWNWEHLIAETEELINYTRNQRHPAFLQIDTYRLKAHSKGDDLRNIDEIEHFNTIDPINVILRERAAELETEVAGVQERVNDAIRKAKQARSSPFYGAETQLQSRSSTFHPLPSQGSKIRLSRAINKAFLEIMELDKNILFIGEDVKAPYGGAFKISDGLSDSFPEQVINTPISESAIVGIGCGLAMHGYCPFVEIMFGDFLTLAFDQILNHAAKFRDMYNDQVKVPLVIRTPMGAGRGYGPTHSQTLEKHFMGIPGLTILAINNLIDPAIVYKTLAKQEEGPVLLIENKILYTKSIRNAPLGFTSYASDDPFPAVVVSPLSTNVDVVIFGYGGLSDLLVDVAEELFVEHDVIAQVICPLQIYPFSVIPYIKLVSKCKIAIIVEEGQGFAGFGSEVVAQLTEILGKLLPRTIRIYPSSMAIPSSKALENLMIPGKDMLIERILKAYISEAEPQQ

SEQ ID NO: 50722 - protein, 427 aa, Heliobacillus mobilis
MLWQRGGKHMNLVSELALKGKQAKDAAYKLASISSQIKDKALEAMAYALVAQEEEILAANALDVEAGRNKGMSNALLDRLMLNKKRIEEMAEGLYALVSLPDPIGEVVRQWRRPNGLEIGQVRVPLGVVGIIYEARPNVTVDAAGLCLKTGNAVLLRGGSEAIRSNMAIVKVIAAAAEEAGLPSGSIQLVEDTSREVAQQMMTMNKYLDVLIPRGGAGLIQTVVKNATVPVIETGVGNCHVYVDSHADLDMAENIVINAKTHRPGVCNAMETLLVHQDVARKFLPHVGKRLQEMNVELRGCPRTLALIEGAKEATEEDYQTEYLDLILAVRVVDSFEEALAHIRRYSTGHSEAIVTNDYLRAREFTRCVDAAAVYVNASTRFTDGFQFGMGAEIGISTQKLHARGPMGLNEMTTIKYVCYGDGQIRQ

SEQ ID NO: 50723 - protein, 168 aa, Triticum aestivum
  misc_feature (8)..(8): Xaa can be any naturally occurring amino acid
  misc_feature (15)..(15): Xaa can be any naturally occurring amino acid
  unsure (1)..(168): unsure at all Xaa locations
NSKKLFEXKLKEIKXTLTTMINEEAEISEVTEVVKQQVKDGKFPDIEVVRMLWDVLMEAVQWSGKNQQQNSNSALRQVNAWAGLMNAFCTSGKLELELIYKVQTQCYEDAKLMKLFPEIIRSLYDQDVLAEDTILLWFRKGSNQKGRQSFVKALEPFVKWLEEAEEEE

SEQ ID NO: 50724 - protein, 468 aa, Azoarcus sp. BH72
MKKLFAILLTALTVGFAGGVIAQENTAAPTAPAAVEAPAATDAAPAAAEAPAAAEEVVATVNKGDVAWIMTATLLVLFMALPGLALFYGGLVRTKNMLSVLMQVMVVFSLIAVLWAFYGYSLAFTEASPFIGSLDKLFLSGVSNSTLADTFSADAKLPEYAFIAFQATFAGITCALIVGSFAERIKFSAVLLFSVIWFTFCYLPICHMVWGPGGFLLGDGALDFAGGTVVHINAGVAGLVGAYMVGKRIGFGRESMAPHFVTLTMVGASMLWVGWFGFNAGSNLEATAGAALAFINTLLATAAAVLAWSLGEAMFKGKPSMLGAASGAVAGLVAITPACGSVGPMGAIIIGLLAGFVCLWGVNGLKRMLGADDSLDVFGVHGLGGILGAILTGVFTAPSLGGTGAEDFAMGHQVWVQTYSVLITIVWSAVVAFIGYKIADMFVGLRVPEEEEREGLDVTAHGETAYHY

SEQ ID NO: 50725 - protein, 497 aa, ASPERGILLUS NIDULANS FGSC A4
MRLLTALKTAPLLAACVVAKANYPAIPVDTTTPVQQRLAIYGPNSISIGWNTYEKLNESCVEYGTSSEKLDRRACALVEPTTYPTSRTYENVVILTDLTAGTTYYYKIVSTNSTVDHFLSPRVPGDETPFSINAVIDLGVYGEDGYTIKGDKSKKDTIPTINPALNHTTIGRLASTVDDYEFVIHPGDFAYADDWFLSLDNLLDGENAYQAILENFYEQLAPISGRKPYMASPGNHEAACQEIPFTTGLCPDGQKNFTDFMHRFGRTMPSSFTSVSTNDSAKVFANQARELAQPPFWYSFEYGMAHIVMINTETDFEDAPSGKGGSAHLNGGPFGAKNQQLEFLEADLASVDRDVTPWVIVAGHRPWYTAGSACTPCQEAFEDLLYTYGVDLGVFGHVHNAQRFLPVYNSVADPNGMQDPKAPMYIVAGGAGNIEGLSSITKQLDFTEFANDEDYTYSTIRFLDRNHLQVDFINSVSGEVLDTSTLYKSHEARFVRQ

SEQ ID NO: 50726 - protein, 271 aa, Heliobacillus mobilis
MSTKGGTERIEHTFQQLKAEGRTAFIPYITAGDPDLNTTAELVLALEASGASIVELGVPFSDPVADGPVIQEAACRALAGGVTLMKVLKMVEELRNRSQVPIVLMTYYNLLMRMGLKRFAQEAYAAGVDGVIIADLPVEEGDELRSYLDEVGIALIPLVAPTTPPERIQLIAEKARGFIYCVSLLGVTGDRTELPPDVDLLLNRVREQTDLPLGLGFGISTAAHASAVAPKADGVIVGSAIVKRIAQHPDDKDQAIAEVRQFTKEITAALA

SEQ ID NO: 50727 - protein, 454 aa, Azoarcus sp. BH72
MNDVQFPTAAAARPHPRGTAATAALLMLGLSGTALAQEAAPATLNSGDTAWMMVSSVLVLMMLVPGLALFYGGMVRAKNVLSVFTQCFGVAGVIGMLWVIYGYSIFSDTTAMEAGVVNLHSFIGGFKQAISPTSTAPASPASIPESVFATFQMTFALITPVIIAGSFAERMKFSAVLLFTALWFTFWYAPLAHMAWSAPGGPAWDWGILEFAGGTVVHINAGVAGLVAALVLGRRRGYPHVAMPPHNLGFALAGAALLWVGWFGFNVGSAVAANENAGMAMLTTQIAACAGVVGWLVVEWLKAGKPSALGAASGALAGLVAITPACGFVGPSGALYMGLITGAVCFFAIGWLKRKLGYDDSLGPFGLHGIGGIVGSLLTGVFASKSLGGFQDIEIASQVQIQAQSVLFTVLYCAIVTWVLLKLTGLVTRGLRVSADDEQEGLDQSQHNERAYNV

SEQ ID NO: 50728 - protein, 69 aa, Glycine max
  misc_feature (22)..(22): Xaa can be any naturally occurring amino acid
  misc_feature (55)..(55): Xaa can be any naturally occurring amino acid
  unsure (1)..(69): unsure at all Xaa locations
VDDRHCRPRLAIIEYIPLSASXSGVRTSDDKLGALCMQSLQDNVHSIREAAANNXKRLAEECGPAWAMQ

SEQ ID NO: 50729 - protein, 479 aa, Methanosarcina acetivorans C2A
MVAMKMQINGKAVEACGGEVFGIKNPATGELIEQVPRGTEEDVAVAVEAASSAFTGWASASPQQRGEVLYRAAEIVRQRKDELASLLTQEQGKPIVEARNEIEGFAHVLEYYCGLSGSQRGDFIPVPGNGYAFTVKKPLGVCAAIIPWNMPALIMGWKIAPVLISGNTLVLKPASNTPLTNLTLASIFVEAGLPAGVLNVVTGPGETVGESLVRSPEVRKISFTGEARTGKRVAELAACGMKRITLELGGSDPMLVCDDADLESAAAGALRGRFYNCGQTCTAVKRLYVFESVAEEFIKKLETGIKSLRLGNGMDKNISMGPLNNRTQWEYIKELAAEIEEKDAGRIITGGKVPEFKDSEKGYFFEPTLVSDVPGDSRLLKEEVFGPLLPVVTVKNLDEAIVGANSTCYGLGASIWTKNIDRARKGCEQLNAGIIWINQHLKVAPEVPFGGVKESGFGRENGPESLSEYLETKTIMLKI

SEQ ID NO: 50730 - protein, 419 aa, Oryza sativa
MFSSLRRASCNVAMNAKSTHWWTNVKMAPPDPILGVTDAFKRDKNPNKINLGVGAYRDDNGKPYVLECVKKAEKQLAEQNLDKEYTQITGVSDFCEAAVRLLLGDDSPAIKNKLYGVAQTISGTGGLRVGFEFLRKYSPYAKTVWMPTPTWGNHGPIANDSTFEVKYYRYYKPSNRGFDFEGCLEDLNKIPEKNVILLQSCAHNPTGVDPTQEQWKEISHVIKKRQLFPFLDTAYQGFASGDIDRDAFAPRLFARDGHEFIVAQSFSKNMGLYGERVGTVSFVVNDKQDLERILSQLRVTIRRLYSNPPRHGAQVAARVLTQPDLRALWLKEVKLMADRIITMRSTLVDNLKKEGSKHNWQHITDQIGMFCFTGLQEKQVERLIKDFSVYLTKDGRISIAGVSSKNNAYLAHAIHEVTK

SEQ ID NO: 50731 - protein, 269 aa, Haloarcula marismortui ATCC 43049
MPEMSDAMSKPHTERFRLENQRAIITGASSGIGRAIAEEFAADGADVVVCSREQDNVGPVADEINDSDRPGEAVAIECDVTDREAVEALVEATVDEFGGLDVLVNNAGASFMSGFDDISENGWKTIVDINLHGTYHCTQAAGDALAADGGGTVINLSSVAGEQGAPYMSHYGAAKAGVSNLTSTLSAEWADRDIRINCIAPGFVATPGVESQMGVSADNIDREAVERRIGLSEEIADIALFLASPASSYIVGQTITAAGVPRLEETPDI

SEQ ID NO: 50732 - protein, 553 aa, Bacillus cereus ATCC 14579
MKDWHKSVVYQIYPKSFNSYYNRETGDIKGVTEKLDYLKELGVDYIWLTPIYQSPQNDNGYDVSDYYSIDPSYGTMEEFEELLAEAKVRNIEIMLDIVVNHSSTEHKWFKEAKEDKNSPYRNYYIWRDEKNNWQSKFGGSAWKYDEKTEQYYLHLFDETQADLNWENEKLREEVYDMMRFWLDKGVTGFRLDVINLISKDQCFLNDEGSTATSDGRKYYTDGPRVHEYLQEMNRNVFAGKDVITVGEMSSTTIDNCIKYSNPERNELSMTFSFHHLKVDYPNGDKWTKADFDFIKLKEIMSSWQIEMQKGGGWNALFWCNHDQPRIVSRFGDDGKYRNESAKMLATAMHMLQGTPYIYQGEEIGMTNPKFESIEQYRDVESLNIYDIKLKEGLSKEEIIGILKQKSRDNSRTPMQWNEEMNSGFTTSTPWISAAENFKEINVEKALEDKESVFYHYKKLIELRKTYDVITEGEYAILDKNDPKIWAYTRTTESEVLLVINNFYGEEITYSVPAHVQLDGMKQEVLLSNYKDASKDIAKLNLRPYESIVYRYTK

SEQ ID NO: 50733 - protein, 406 aa, Synechococcus elongatus PCC 6301
MRHRRSGQRRLSVRAILSHTLAISLGVLVTVGGLQARPSLAQAAPVEIAQATPANTAAPNSNPDSFVAAAVRQIGPAVVRIDTERTVTRRAAPMFDDPFFREFFGSDFFGNVNPPARQEVQRGQGSGFVVDGNGLIMTNAHVVANADQVRVTLRDGREFTGRVRGADSVTDLALVEVDTKGERLPTARIGNSSNVEVGDWAIAIGNPLGLDNTVTLGIVSSLGRRSSAVGIPDKRLDFIQTDAVINPGNSGGPLVNSRGEVIGINTAIRQAPGAGIGFAIPVNTAKQIETQLLKNGKVSHSYLGVQLLSLTPQMARDNNRDPNSTVRLPEVQGVLIMGVQRNAPAATAGLRRGDVVIATDGQAVTTADEFQRRVEASQVGQSLNLSVIRDGNRQQIAVRTGELQAG

SEQ ID NO: 50734 - protein, 336 aa, Vibrio vulnificus CMCP6
MNILVTGGSGYIGSHTCIQMIEAGMTPIILDNLYNSKLLVLDRIEQVTGVRPTFYQGDIRDSEILQHVFAQHDIQGVIHFAGLKAVGESVEKPLMYYDNNVSGTLNLVREMDKAGVKSLIFSSSATVYGDPASVPIRENFPTSATNPYGRSKLMVEECLTDFHKANPDWSITLLRYFNPVGAHESGLLGEDPQGIPNNLLPFVAQVAVGRREKLGVFGDDYPTPDGTGVRDYIHVIDLADGHLAALNKVGQQAGLHIFNLGTGQGNSVLEMVAAFEKAAQRPIPYEIKPRRAGDIAECWADPAYAEQVLGWKATRSLETMVVDTWRWQSNNPNGYE

SEQ ID NO: 50735 - protein, 298 aa, Zea mays
MATSYRRVPLLLLCLGVLVSCSFAAGSLDQELDITWGDGRGKVLDNGRLLTLSLDRTSGSGFQSRHEYLFGKIDMQLRLVPGNSAGTVTAYYLSSQGGAHDEIDFEFLGNVSGEPYTLHTNVFTRGQGQREQQFRLWFDPTADFHTYSILWNPKHVIFMVDDMPIRDFRNLESKGVAFPKSQPMRLYSSLWNADDWATQGGRVKTDWSHAPFSASYRGFKADACVAVAGGRTRCGATVGTEGTGAPASAAGAGDWYNQELDLTLQQRMRWVQRKYMIYNYCTDPKRYQQGLPAECSMQ

SEQ ID NO: 50736 - protein, 260 aa, Mycobacterium avium subsp. paratuberculosis K-10
MAERLAGKVALVSGGARGMGASHVRSLVAEGAKVVFGDILDDEGKAVAAEVGEATRYLHLDVTKPEDWDAAVATALAEFGRIDVLVNNAGIINIGTLEDYALSEWQRILDINLTGVFLGIRAVVKPMKEAGRGSIINISSIEGMAGTIACHGYTATKFAVRGLTKSAALELGPSGIRVNSIHPGLIKTPMTEWVPEDIFQSALGRAAEPKEVSNLVVYLASDESSYSTGSEFVVDGGTTAGLGHKDFSNVETDAQPDWVT

SEQ ID NO: 50737 - protein, 446 aa, Streptococcus agalactiae 2603V/R
MYQTQTNKEKFVLFLKLFIPVLIYQFANFSATFIDSVMTGQYSQLHLAGVSTASNLWTPFFALLVGMISALVPVVGQHLGRGNKEQIRTEFHQFLYLGLILSLILFLIMQFIAQPVLGSLGLEDEVLAVGRGYLNYMLIGIMPLVLFSICRSFFDALGLTRLSMYLMLLILPFNSFFNYMLIYGKFGMPRLGGAGAGLGTSLTYWAIFIVIIIVMSLHPQIKTYHIWTLERIKAPLIIEDIRLGLPIGLQIFAEVAIFAVVGLFMAKFSSIIIAAHQAAMNFSSLMYAFPLSISTALAITISFEVGAERFQDANTYSRIGRLTAVGITSGTLLFLFLFRENVAAMYNSDPHFVAITAQFLTYSLFFQFADAYAAPVQGILRGYKDTTKPFMIGAGSYWLCALPLAVILEKNSQLGPFAYWIGLITGIFVCGLFLNQRLQKIKKLYY

SEQ ID NO: 50738 - protein, 891 aa, Arabidopsis thaliana
MASSSCFLRSILFSSPTNLRSNHHLPTFFPKNYLICSHSTSSRFESLSVSSIGTGSTKKSSDTRRKVKSMATTNIGKEEKKRVEIYDLEENLVIDLAKFTADLSDKFCKERGAFTVVVSGGSLIKSLRKLVESPYVDSIDWARWHFFWVDERVVPKNHDDSNYKLAYDSFLSKVPIPPGNVYAINEALSAEAAADDYETCLKHLVNTNILRVSESTGFPKFDLMLLGMGPDGHVASLFPGHGLCNESKKWVVSISDSPKPPSERITFTFPVINSSAHVALVVCGSGKAEAVEAALKKTGNVPPAGSVSAEDELRDREKNRNSLQRSGSYFFNNAAKTEKKGRMVFAGVVDQICYRLEKEFWVSMKALRRIQTKSTFPNPSSPSSPWTHLRSAFVLVTSSSPASCSSSSDPHRLKSPWSRRKGKKPLTLRRWRRCFTPEGRIRNGGVDLLKKVRTRGIDPSIRSEVWPFLLGVCDFNSSEEERGATRTWRRKVYERLRRQCKRLQKQNSGTFKLNKINKTTQDDEHDSWSLAQDSESSCSDDACSVHESLISDKDNTEDIGYMSDVSCTLDRDYNGSRHLNSESSDSDSSDENDYVQVAPSCEGKDENSTSPSSIYISRTKEDFVTWQRIIRLDALRADTEWTPYSQSQALVSENRARRAAEAVGLKDYSYLEPSKIFHAARLVAVLEAYALHDPEIGYCQGMSDLLSPILSVIPDDYEAFWCFVGFMKKARQNFRVDEVGITRQLNIVSKIIKSKDSQLYKHLEKVKAEDCFFVYRMVLVMFRRELTLEQTLHLWEVIWADQAAIRAGMGKSSWSRRIKQRAPPTEDLLLYVVAASVLQRRKVIIEKYSSMEEILRECHNMVGKLDVWKLLDDAHDLIVTLHAKIEHSIPQ

SEQ ID NO: 50739 - protein, 448 aa, Oryza sativa
VFYPPHSPSRRRPRATFPEAPDPLNPPPPPRQIVVFMSSKEKPTLGGQRIKTRKRNIAAPLDPASFSDAIVQIYLDNAGDLELVAKSIESSDLNFSRYGDTFFEVVFIGGRTQPGTIKPEEEGERHPYSVLDCAAQREAILPSVLYIQKTLRRRPFLIKNLENVMRKFLQSLEFFEENERKKLAIFTALAFSQKLSGLPPETVFQPLLKDNLVSKGIVLSFITEFFKEYLKENTLDDLIALLKKGKMEDNLLEFFPSAKRTSEALSEHFTKEGLTSLVEYNEKKMFEVKLKEIKLTLTTMINEEAEISEVTEAVKQQVKDAKFPDIEVVRMLWDVLMEAVQWSGKNQQQNSNSALRQVKAWAGLLNAFCTSGRLELELIYKVQTQCYEDAKLMKLFPEIIRTLYDQDVLAEDTILLWFRKGSNPKGRQSFVKALEPFVKWLEEAEEEE

SEQ ID NO: 50740 - protein, 614 aa, Thiobacillus denitrificans ATCC 25259
MTPVEAEARRTQLKNLIILGKERGFLTYAEINDHLPDEVLDADQIEGVISMINDMGIQVYDEAPDAETLLMQEAAPAVADEDVVAEAEQALTTVDSEFGRTTDPVRMYMREMGSVDLLTREGEIEIAKRIEEGLRHMVQAISSCPLTIQQILDMAAQVEKDELRIDELIDGFVEAETEAAAEEETAAGDDETDEDDEDASAAVAAANLAQLKAEALAQFDYIRKAYKKAQNAHVKYGLGSAQHMKAQAEVTELLMAIRFSVRQVDNLCEQIRSAVEEVRSHERKIMEFCVNRSGMPRAHFIKAFPGNETNLAWLDREIAAKKAYCSTLSKVQYEVKAHQEALIAMQDRVGLPIKNLKDINKQMSTGEAKARRAKREMIEANLRLVISIAKKYTNRGLQFLDLIQEGNIGLMKAVDKFEYRRGYKFSTYATWWIRQAITRSIADQARTIRIPVHMIETINKMNRISRQILQETGIEPDPATLAIKMEMPEDKIRKIMKIAKEPISMETPIGDDEDSHLGDFIEDASTLSPDDSAIYANLRDATREVLDSLTSREAKVLRMRFGIEMNTDHTLEEVGKQFDVTRERIRQIEAKALRKLRHPTRSEKLKSFVGSGEQ

SEQ ID NO: 50741 - protein, 253 aa, Brassica napus
  misc_feature (155)..(155): Xaa can be any naturally occurring amino acid
  misc_feature (192)..(193): Xaa can be any naturally occurring amino acid
  misc_feature (197)..(197): Xaa can be any naturally occurring amino acid
  unsure (1)..(253): unsure at all Xaa locations
METLNPLSHVPISDHRFVGQDMMSLQSPSSIWTKEENKMFERALAIYPEDSPDRWFKIASMIPGKTVFDVMKQYSKLEEDVFDIEEGRVPIPGYPSPLGLAQDTYRKRPNGARGSDHDRKKGVPWTEEEHRRFLLGLLKYGKGDWRNISRNFVVXKTPTQVASHAQKYYQRQLSGAKDKRRPSIHDITTGNXXNANXNRSFSDHRDILPDLVFIEKDNAEGLMCMSPNLFSPSSAPFDDAFNFAGVNAFSAGA

SEQ ID NO: 50742 - protein, 385 aa, Bacillus cereus ATCC 10987
MKKAIKFCLIATLSTAIVSGCSFEGNNENAKGKEGEKVEIQKTVGKYTMPDEKDKHEGTWLQWPHEYTYGEEYKQEVEPIWVKMASALTEGEKVHIVAYDEEEKERINKLLIDKGLNMDKIDFFIAPTDDVWARDSGPIFVYDNNKNLKILDPAFNGWGKKTPYKNDARIRENVSKQAGIERIDWGKFVLEGGAIELDSNGTALLTRSAVTNKNRNPDLSEKEIEKYISDLGVTNFIWLDGVPNLDITDFHIDGFAKFHNKSTIVTMKEDDLAEWGLSNKDMDTLLDAKNALGKKYKYEYLPLSKEKVVLENGKTLDYKGSYINYYIGNTVVLVPNYNDPNDKIANDTIQKLYPDRKVVGIDVRELYKNGGMIHCVTQQQPIALK

SEQ ID NO: 50743 - protein, 522 aa, Metarhizium anisopliae
MPSLGFLKKKRTRDSNPDPSTSTPTSPVAATSPSKPFDSSTLQQRTSGSQAKTAPGTAPAPSQGSAATAAPASQQQQMNPANAQGGTFVTPLPMQTNQADSQSLPSINNLIHQPQNGASTNNYSSFNPAALGAQISHPPSASPGTDPGHMQQQQQQAYPQPAMQPQQQAGHLPDQQQQQYQQQQHEQRVHHQHQGSVTRVTKGKYSLGDFDILRTLGTGSFGRVHLVQSKHNQRFYAIKVLKKAQVVKMKQVEHTNDERRMLSDVKHPFLITLWGTFQDWKNLYMVMDFVEGGELFSLLRKSGRFPNPVAKFYAAEATLALEYLHSKNIIYRDLKPENLLLDRHGHLKITDFGFAKRVPDKTWTLCGTPDYLAPEVVSNKGYNKSVDWWSLGILIYEMLCGYTPFWDSGSPMRIYENILKGKVKYPAYINTDAQNLLERLITSDLTKRLGNLYGGSQDVKNHPWFSEVTWDRLARKDIDAPYTPPVKAGTGDASQFDRYPEDPEKYGGIGGSDEYGHMFTDF

SEQ ID NO: 50744 - protein, 186 aa, Brassica napus
TIKMGISRSKGNTHNIFLLCNYILLGSASSCIFLTISLRLFPSLSGLSLIFLHTLTIATAVTGCSVFASSTAATTSDRLYGAHMVATVLAAIFQGAVSVLIFTRTGDFLRVLKSYVLVEDGAVILKLAGGLCILMFCLEWVVLVLAFLVKYSDYLDESVVDDDGSKFQRQKEDLKDWPSYPFQLKL

SEQ ID NO: 50745 - protein, 313 aa, Oryza sativa (japonica cultivar-group)
MAVHPLLRLLLLRPPPPPPPPPPNSPPFATTRRASSASAAAAAALLLLAASPRPRPARADPGGGGGEDIDEARVVRLFQEASPSVVFIKDLVVGRTPGRGGGQAVEAEDGEEGGATVEGTGSGFVWDTAGHIVTNYHVVAKLAGDGSAFHRCKVLLEDSSGNSYLKEGRLVGCDPSYDLAVLKVDVDGDKLRPALIGTSKGLRVGQSCFAIGNPYGYEHTLTTGVVSGLGREIPSPNGRPIRGAIQTDAAINSGNSGGPLIDSYGHVIGVNTATFTRKGTGISSGVNFAIPIDTVVQSVPNLIVYGTSVSNRF

SEQ ID NO: 50746 - protein, 731 aa, Oryza sativa
MAATAAAAGPASPAVSFSLPSPPLPRRADCRRGRGHGHRPRRGPPLLRAASTAAPPSSSPSSQSPGSLSIQLSPRASPPAAPTHVASLARDRAEDLQAESRAMTRAAAATVFSPELLSSRYGSRPVALRAAEVVSKIGAFGLKVFLDEQRGQSSSAVRRARAVELRTILTRLGPTFVKIGQGLSTRPDLCPPEYLEELSPLQDSLPTFPDEEAFACIERELGFPLDSIYSTISPSPIAAASLGQVYKARLKYSGQLVAVKVQRPGIEDIIGLDFYLLRGLGYLINKYVDFISSDVVALMDEFARRVYQELNYVQEGQNARRFKKLYADKQDVLVPDIFWDYTSAKVLTMEWIEGVKLNQQAAIEKQGLKVLDLVNIGIQCSLRQLLEYGYFHADPHPGNILATPEGKLAFLDFGMMSETPEDARVAIIGHVVHMVNRDYEAMARDYYALDFLEPDVDVSPIVPALKSFFDDALNSTVSELNFKTIVDGLGAVLYQYPFNVPAYYALILRSLTVLEGLALYADPNFKVLAASYPYFAKRLLTDPNPYLRDALIELLFKDGKFRQVYVLMKWNRLENLLVQGSQDREFAAKDALQPVLKLLLGPDGEELRVLVVKEAVRVTEAITFGTLIDSYNAAPEFLKPLISSGNPAGPFKISDTEREQMIELRDRVFRIWGLLRSSDGFDPTILQPIVQVLQEPEARVLGSRVAGGVTQRLAARLLQQLLRTPPAPGSP

SEQ ID NO: 50747 - protein, 520 aa, GIBBERELLA ZEAE PH-1
MSTFQKKLLAAIIKSLLRGKSLVQSLLAYWSSSLGHDTSSKPRVGNTPRRSIQEFLKEAETLFLDPIGQDSLQQLSRNLRKQLLQRLEADMECMLPSYSHQLPRGTEVGRFVALDVGGSTLRVALVELCGRMSNIGEESKIASMRNFRITPDIKALEGMAFFDWMAEKILETLSEELEQDGRSDGPLPMSMAWSFPIEQTSLAGGKLQGMGKGFCACDGLLGWDLGDIVRTACLNRGLNVELRAIVNDSSACLLSESYNHPTTRFGLILGTGVNLAAYLPVSAIGRVKFGQRPPQWFEKATHVIINSEISMMGRDILPLTRWDRQLLANHARPEFQPLEHMVSGIEFDHSVDYDGTLMMNRDTTSGLEEARKQFSSCHPAKHAPTTADMELLKQLAGFISKRSSALVATGVHAFWNLRIESQNNFVQTMSTESPERESAEADRDLAETTVAYNGGVIESYPGYLDSCQSYLDELVAGDKREKSGNRTIKLVSAKESSLMGAAVALASLEEVVEGPLGVVG

SEQ ID NO: 50748 - protein, 435 aa, Zea mays
MEMKLTIRRVPTVVSNYQEDADKPRAGCGRNCLGDCCLPASKLPLYAFKLTPAKGSQEDAASTKLLVDILLSEWEDRMTRGLFRYDVTACETKVIPGNLGFVAQLNEGRHLKKRPTEFRVDRVLQPFDPAKFNFTKVGQEEVLFQFENSGGDDSYFLNNAPIIAVDRAPNVIAINVSPIEYGHVLLIPRVLDRLPQRIDPESFLLALQMAAEGGSPYFRLGYNSLGAFATINHLHFQAYYLSVPFPVEKAATHKIPLSEDTKKNGVTVSKLINYPVRGLVFEGGNTLDDLATVVSNACIWLQDNNVPYNVLISDCGKRVFLFPQCYAEKQALGEVSQELLDTQVNPAVWEISGHMVLKRRMDYEEASETSAWKLLAEVSLSEERFEEVKAYIFSAAGLVQYDEEEEEASDGEGPTAYVPVKVTPLPVAEGCLVLP

SEQ ID NO: 50749 - protein, 624 aa, Magnetococcus sp. MC-1
MNLGIRGKLFLLSFILILLVGASVGMLLELALGNWLQAQIRGELESYARLGVASLMDQRLDYTMTGLDALADHLGEITQSRVTIVDVDGRVLGDGRVALAALPSVDNHAKRPEIVQAYKEGSGASIRYSATLKTDMFYVARTYHLKDGQMGVLRVAKPMSQLAPIRERLRLMLVLAGILAVLAAMGVSSLAAHFSTRRFRKLMAQVHAISSEALSSSVAPVEMQPGDELGLLGASFRSMAMELRRNVSSVTRERRLLQGVLQGMADGLLVVDDHSRVVLSNPPAETLLGVGEEHVGETLQSVLSSQCYQQLSQVLQVENNLPGSVELTLTFGDESRFVQAQWTPMEGERGYIIVFHDNTILRRQEQIRRDFVANVSHELRTPISILQANAETLLNGALNDKAYGVQLVNAIERHAIRLSQIISKLLDLARLESNELIFKNEPLNISSIVNSVQEHITPLAQEKNITCWSMIKPEVVCMGDREAVEEVLSNLVSNAVKYIPAGEQISITCSELQGFNRIEVSDTGAGIDASHHSRVFERFYRVDKGRSRDMGGTGLGLSIVKQMVRKMGGDVGVESVNPHGCRFWFTLPKKMEGQRVTRPATGHPAILPDDAPLDLKGHEVGRHP

SEQ ID NO: 50750 - protein, 1026 aa, Nostoc sp. PCC 7120
MGSVLYSLSESANLYPASELFLRHRLQIVEELWESVLRQECGQNMVDLLRQLRDLCSPEGQATKDQAVSAVKLIEQLNINEAIRAARAFALYFQLINIIEQEYEQRQQLTRYSDLEAETAPLNGSENITSSSNHNEDDVIFNRGLGTDFLGKNWTNRGQGKQKGTFAALFPLLSKLNVPPQQIQRLISQLDVRLVFTAHPTEIVRHTIRDKQRQVVDLLQQLDEVENRAKDGGGYPWEAGEIREKLLEEIRLWWRTDELHQFKPTVLDEVDYALHYFQEVLFDGIPQLYKRFKYALNQTFSWLEPPSKDFCSFGSWVGSDRDGNPSVTPEITWQTACYQRKMVLERYIKSVTQLIELLSISMHWSDVLPDLLESLELDQSQLSEVYDALALRYRQEPYRLKLAYVLKRLENTRDRNLALYKGETPTNEDSPMYRSGSEFLAELRLIQHNLTETGLSCRELDNLICQVEIFDFNLTKLDIRQESTRHSDALNEILDYLQLLPQPYNDLSEEQRVAWLTTELQTRRPLISSELPFSDKTNDVIKTFRVVRSLQQEFGINICQTYIISMCRQVSDVLEVLLLAKEARLFDPAIAVGTIQVVPLFETVEDLQRSRSVMRQLFELPLYRALLAGGYKNTEVKVPNTELTPQSPAPSPQSVLTPDLQEVMLGYSDSNKDSGFLSSNWEIHKAQKSLQQIAEEYGVNLRIFHGRGGSVGRGGGPAHEAILAQPGHSINGRIKITEQGEVLASKYSLLDLALYNLETITTAVIQASLLRTGFDDIEPWNEIMEELAARSRQHYRGLIYEQPDFIDFFHQVTPIEEISQLQISSRPARRPSGKKDLSSLRAIPWVFSWTQTRFLLPSWYGVGTALQEFFNEEPEEHLKLMRYFYVKWPFFKMVISKVEMTLAKVDMQMAGHYVQELSDPEDKPRFEKVFEQIANEYYLTRDLVLKITDHGRLLDGDPVLQRSVQLRNGTIVPLGFIQVSLLKRLRQSKNNTATSGVIHSRYSKGELLRGALLTINGIAAGMRNTG

SEQ ID NO: 50751 - protein, 97 aa, Pseudomonas aeruginosa
MKLRPLHDRVVIRRSEEETKTAGGIVLPGSAAEKPNRGEVVAVGTGRVLDNGEVRALAVKVGDKVVFGPYSGSNAIKVDGEELLVMGESEILAVLED

SEQ ID NO: 50752 - protein, 547 aa, Pseudomonas aeruginosa
MAAKEVKFGDSARKKMLVGVNVLADAVKATLGPKGRNVVLDKSFGAPTITKDGVSVAKEIELKDKFENMGAQLVKDVASRPTDAAGDGTTTATVLAQAIVNEGLKAVAAGMNPMDLKRGIDKATVAIVAQLKELAKPCADTKAIAQVGTISANSDESIGQIIAEAMEKVGKEGVITVEEGSGLENELSVVEGMQFDRGYLSPYFVNKPDTMAAELDSPLLLLVDKKISNIREMLPVLEAVAKAGRPLLIVAEDVEGEALATLVVNNMRGIVKVAAVKAPGFGDRRKAMLQDIAILTGGTVISEEVGLSLEGATLEHLGNAKRVVINKENTTIIDGAGVQADIEARVLQIRKQIEETTSDYDREKLQERLAKLAGGVAVIKVGAATEVEMKEKKAPVEDALHATRAAVEEGVVPGGGVALVRALQAIEGLKGDNEEQNVGIALLRRAVESPVRQIVANAGDEPSVVVDKVKQGSGNYGFNAATGVYGDMIEMGILDPAKVTRSALQAAASIGGLMITTEAMVAEIVEDKPAMGGMPDMGGMGGMGGMM

SEQ ID NO: 50753 - protein, 225 aa, Magnaporthe grisea 70-15
MLNSYPLPAHGRGPVDVCRYRPQPVLKRPKPESQHMAMNRWELAALHAAEEEHRASQHGSSHYLPRQDSLIYPGLYSHSGINMLDILFRIAARPNPQIDLGPIDSSCAMILCDLALPDTPIVYATNPFLELTGYSSEEVIGRNCRFLQAPPDNGAVNQGSPRQHVSKNLVQDMRRSVDSNYEIQLEVPNFRKDGTRFTNILTMIPIRWDGADYRYSVGFQCEKEC

SEQ ID NO: 50754 - protein, 649 aa, Lactobacillus johnsonii NCC 533
MCGICAFFDPELKDKDCAIQGMMDTIKHRGPSSDGKYTNDKVALGFRRLSIIDLRGGSQPIFNEDKSRAIIFNGEIYNFKPLRKELIDAGHTFTTKADTEVLLHGYEEWGMDGLLKKVRGMFAFVIWDDNTKTLYGARDFFGIKPMYYSDQNGKLIVGSELKSFLAYPGFKKELNTEAVKPYLMNQYNDLKETFFKGVYRFPAGHWFEYKDGKMKTHQYWDAKYVENSLSFEETLDKINEDLKETVDLYRNADVPVGAFLSEGIDSSYLTSLLDPEDVFSVSFDDSTYNEASKAKALSDLHGWKFFADKVDADEAMRDFPEMQYHMDEPDANPSIIPLWYLCKLARKHVTVALSGEGADELFAGYVNYGMHTHNDVIKVFTAGLKKLPKKSRVRLAHKIKKMPNFPGKVHMYTNLAEPSEFYVGQSVIYDMDYPTIFTSKDANGILRDKYKNDLTVNGIYQEDFKKVKNIDEVKQMQYIDLHHFMLNDIEQKADKISMAHSLELRVPYLDKKIAELANSIPTKYLVNRHDTKYALRKASEKVLPEEWAQRPKLGFPTPIKQWLKEPRFYKQVRALFTEDFVDDIFDQKKIVKLLDDNYKGDGSARRQIWAIYTFLVWYKLFFVDYDETVKKYQHVQPEVAELIESGRLV

SEQ ID NO: 50755 - protein, 344 aa, Porphyra purpurea
MSYPKKVELPLTNCNQINLTKHKLLVLYEDMLLGRNFEDMCAQMYYKGKMFGFVHLYNGQEAVSTGVIKLLDSKDYVCSTYRDHVHALSKGVPSQNVMAELFGKETGCSRGRGGSMHIFSAPHNFLGGFAFIAEGIPVATGAAFQSIYRQQVLKEPGELRVTACFFGDGTTNNGQFFECLNMAVLWKLPIIFVVENNQWAIGMAHHRSSSIPEIHKKAEAFGLPGIEVDGMDVLAVRQVAEKAVERARQGQGPTLIEALTYRFRGHSLADPDELRSRQEKEAWVARDPIKKLKKHILDNQIASSDELNDIQSSVKIDLEQSVEFAMSSPEPNISELKRYLFADN

SEQ ID NO: 50756 - protein, 467 aa, Nocardia farcinica IFM 10152
MTSHYDVVVLGAGPGGYVAAIRSAQLGLRTAVVEQKYWGGVCLNVGCIPSKALLRNAELAHIFHKEAKTFGISGDVSFDFGAAFDRSRKVADGRVKGVHFLMKKNKIDEFDGKGTFVDANTLSVELSKGGTESITFDNVIIATGTVTKLLPGTSRSANVVTYEEQIMTRDLPGSILIVGAGAIGMEFGYVLKNYGVDVRIVEFLDRALPNEDADVSKEITKAYKKLGITITTGAAVQSIDDDGTKVTVAIKDNKSGSVETVTVDKVLQAVGFAPRVEGYGLENTGVALTDRGAIAIDDNMRTNVPHIYAIGDVTAKLQLAHVAEAQGVVAAETIAGAPTLTLGDYRMMPRATFCQPQVASFGLTEEQARAEGYDVKVATFPFTANGKAHGLGDPTGFVKLISDVRYGELLGGHLIGPDVSELLPELTLAQKWDLTVNELTRNVHTHPTLSEALQEAFHGLAGHMINF

SEQ ID NO: 50757 - protein, 222 aa, Oryza sativa (japonica cultivar-group)
MEVGNGKCGGGGAGCELCGGVAAVHCAADSAFLCLVCDDKVHGANFLASRHRRRRLGVEVVDEEDDARSTASSSCVSTADSASSTAAAAAAVESEDVRRRGRRGRRAPRAEAVLEGWAKRMGLSSGAARRRAAAAGAALRAVGRGVAASRVPIRVAMAAALWSEVASSSSRRRRRPGAGQAALLRRLEASAHVPARLLLTVASWMARASTPPAAEEGWAECS

SEQ ID NO: 50758 - protein, 475 aa, Bacillus cereus ATCC 14579
MQQPTNEKLHRTMKSRHLFMIALGGVIGTGFFLGSGYTINQAGPGGAILSYLVGGFIMYLTMLCLGELTVAMPVSGSFQKYATKFIGPGTGFMIGWLYWLGWAVTVGLELTSIGLMMKRWFPNVDVWVWCLVFGVILYASNAISAKSYAELEFWFSSIKVITILAFVVLGGSALLGFISYDGKEAAPLFSNFVSNGGLFPNGLAAVLLTMITVNFSFQGTELIGIAAGESENPEKTIPRAIRNTVWRIMLFFILTMTILVGLISWKEAGVIESPFVVVFDKIGIPYAADIMNFVIITALLSVANSGLYAATRILWSLANEGMAPTSFQKVNKRGIPITALVVTIAVAGLSLFTSFLAEDTVYMYLLSIAGLSAVSSWIIIALSQLRFRSQYIKGGGKLEDLKYRTPLYPIVPILALITNSIVVISLAFIPEQRMALYCGIPFIIFCYIYYYISKKRQKPMKVEMEKTNETNNQTR

SEQ ID NO: 50759 - protein, 402 aa, Haloarcula marismortui ATCC 43049
MPSHRVPQGMDAAPTVGELTPPDRTLMGPGPSDVHPRVLKAMSTPLVGHLDPSFIEIMDEVQNLLRYTFRTDNKWTIPVSGTGSAAMEAAIGNVVEPGDTMLVPTNGYFGDRMASMAERAGGEVVTVDAPWGQPLDPAAVEAAFDEHSPDVFGFVHAETSTGVLQPSVPELTDIAHANDALVIADSVTSLGGVELRVDEWGIDVAYSGPQKCLSCPPGASPLTLNDDAMDKVLSRESEARSWYLDISLLEGYWGEERAYHHTAPITNVYALREALRLVAEEGIEERWDRHLRVAGALKAGVEGMGLEMNAPDDFWLPSLNTVRVPDGVDDGAVIQYLLDEYDLEIASGLGALEGDIWRIGCMGHSARRQNVSYLLAALGNALGEQGAAIDVDAGLAAMSERF

SEQ ID NO: 50760 - protein, 648 aa, Prochlorococcus marinus str. MIT 9313
MSAADPIQDNKSWTVADSAALYGLDHWGHPYFSANANGHVQVQPRGDQGSCLDLVELVEELKSRNLNLPLLIRFDDILEDRLERLHSAFEEAISKYGYAGRYQGVFPVKCNQQRHVVEQLVESGRQWHFGLEAGSKAELLIALSLVNDPEALLICNGYKDQRYIETAILARRLGRQPVVVIEQPDEVERIIRSSQELGAAPFLGVRAKLTTRSTGHWSSSVGEKAKFGLSVPDLLATVEALRQADLLSDLRLLHFHIGSQINDIAVLKDALQEAAQIYVELTKLGAPMGYLDVGGGLGVDYDGSRSASAASTNYSLQNYANDVVATVRECCKPHGITLPILVSESGRAIASHFSILVFDVLGTGTVPGAIPKQTVEEPLTIHNLRETLSGVMATQKGAVSEISRLQEAWNDAIKFKEDALAAFRLGYISLPERALAEQLTGACAEAIMGQLPCNETIPDDLQSLRAVLASTYYANLSIFRSAPDTWAIEQLFPLMPIHRLNEEPTQLGHFADLTCDSDGKLDRFIGNGQTKTLLELHNLRQNEAYMIGMFLAGAYQEVMGNLHNLFGSTNAVHIRLTTAGGYQVDHVVRGNTNSEVLEAMEHNPELLLERLRLASELAIQRGELKINDVRRLMDHLEASLRQTTYLQG

SEQ ID NO: 50761 - protein, 236 aa, Porphyra purpurea
MVSSLANELREGTTKSHSMAENVSFVKSFLGGVVDKKSYRKLIANLYFVYSAIEEEILLNKDHPAIKPIYFTELNRKTSLAKDLNYYYGPDWLNIIEPSSATQVYVNRIHNIGNKQPELLVAHAYTRYLGDLSGGQVLKKIARGAMNLSDERGTKFYDFDEIEDDKIFKNNYRSALDTIPLSDEQVQNVVAEANISFTLNMKMFEELNSSIVKIITMIIVSTVRKFTLKSILATAD

SEQ ID NO: 50762 - protein, 453 aa, Chondrus crispus
MTRSIVSLQVGQCGNQVGLKFWEGISAEHGIDVDGKYIGDRPDQELHRIGVYYNESSSGSYVPRAAMLDLEPGVLMAIKNSKRGQLFHPDNFAYGQSGAGNNWAKGHYTEGAELVETALDIIRREAETCDVLQGFQVTHSLGGGTGSGMGTLLVSKIREEYPDRMMCTYSVLPSPKVSDTVVEPYNCTLSIHQLIENADCVFAIDNEALYNICYNTLKIEQPSYDELNSLISSVMSGITCSLRFPGQLNADLRKLAVNLVPFPRLHFFAVGHAPLAASNSAGYRSLSVPELAGQMFDRNNMMAEIDPREGRYLTAAVYFRGKVSTKEVEDEMTLMQTKNSAYFVEWIPHNIKTSVCDIPAAGEKISSAFIGNTTAIEATFKRFGNQFRSMFRRKAFLHWYKSEGMDELEFSEAESNLADLVSEYQQYGEATADGVEGYEEEGYENDHPEDDEE

SEQ ID NO: 50763 - protein, 524 aa, Glycine max
MGFTPTSTATCFLIIAPLVVLWCWKLLKWVWLRPKRLERALRAQGLQGNPYSLLIGDTKEMYTVLMQAARSQQSTSSFLSKDKDAAPHITTFNHHIVNKFGKNSFFWEGTKPKVVITDPEQIKEVFNKIQDFEKPKLSPIVKLLGSGLANLEGEKWRTHRKIINPAFHLEKLKVMLPIFLECCDDMVSKWERLLSSNDKSEIDVWPFLQNLTCDIISRTAFGSSYEDGKRIFELLKEQTGLMMKLQNAYIPGWWLLPTTTNKRMKKIDTEIRALLKGVINKRENAMKAGEVLNNDLLGMLLESNRMEIQDHGKNNIIAMTSLEVIEECNAFYIAGQETTSVLLVWTMVLLSRYPHWQERAREEVLHVFGNQKPDYNGLSHLKIVTMILYEVLRLYPPLIYFARAIKNDVKLGNLSLPAGVQVSLPILLIHQDRDIWGDDATEFNPERFAEGVAKATKGQVVFFPFGWGPRVCLGQNFALLEAKLVLSLLLQRFSFELSPTYAHAPVTVLTLNPKFGAHIILHKL

SEQ ID NO: 50764 - protein, 284 aa, Zea mays
  misc_feature (281)..(281): Xaa can be any naturally occurring amino acid
  unsure (1)..(284): unsure at all Xaa locations
LGTSRPAGDKVQGIPQNEALVFSVQENFHGRTFAAITMSTDPESRENYGPYLPGIGSVCPVTGKPIRYNNVDDVRETLEKHGKNTAAFLVEPIQGEAGIVVPDDSYLREVRALCDKHNVLLICDEIQTGIARTGKMLCHEWSGIKPDLVLLGKAISGGMYPVSCVLGSKEVMLTIEPGTHGSTYGGNPLGSAVAIRALELIEEENMIERAETLGNKFRQGLQDINNPMIKTIRGKGLLNAIVIDESRTNGHSAWDLCMLFKEKGLLAKPTHQNIIRLCPPXIIT

SEQ ID NO: 50765 - protein, 284 aa, Asparagus officinalis
MSSSLMSQCVHIFLAATFVAMSGVHGGNFYRDFDLTWGDGRAKILNNGQMLTLSLDKVSGSGFQSKNQYLFGKIDMQLKLVPGNSAGTVTAYYLSSQGPTHDEIDFEFLGNLSGDPYILHTNIFTQGKGNREQQFYLWFDPTKDFHTYSILWNPQHIIFSVDGIPIRDFKNLEKYRIPFPKIQPMRLYSSLWDADNWATRGGLVKTDWSKAPFTASYRNFQAQACVLSSGRSRCGSGGNRWFNQQLDVASLKRLRWVQKNYMIYNYCTDVKRFPQGIPTECKHP

SEQ ID NO: 50766 - protein, 717 aa, Arabidopsis thaliana [sequence omitted]

SEQ ID NO: 50767 - protein, 120 aa, Arabidopsis thaliana
  misc_feature (56)..(56): Xaa can be any naturally occurring amino acid
  misc_feature (61)..(61): Xaa can be any naturally occurring amino acid
  unsure (1)..(120): unsure at all Xaa locations
MDSVFSNVARAPEDPILGVNVAYNNDPSPVKIYLGVGAYRTEEGKPLVLDVPRKAXQQLVXNPSRDKEYIPIVGISDFTKVSAKFILSADSPAITEKVSHYRPSACLCMVRLKNCAPNFL

SEQ ID NO: 50768 - protein, 284 aa, Asparagus officinalis
MASLLFAVLALSSVGIAVAGNFNDDFKITWGDGRGRIVDNGQLLSLSLDKASGSGFESTHEYLFGKIDMQLKLVPGNSAGTVTAYYLSSQGPTHDEIDFEFLGNLSGDPYTLHTNVFTQGKGNREQQFHLWFDPTKDFHTYSILWNPSHIIFSVDGIPIRDFKNMESRGVAFPKSQPMKIYSSLWNADDWATRGGLIKTDWTKAPFTASYRNFNANACVWSAGTSTCSSKKSPSASPSNAWLNEELDSTRQERMRWVQKNYMIYNYCADLKRFPQGLPPECSVA

SEQ ID NO: 50769 - protein, 334 aa, Pantoea agglomerans
NGIAGSYAEYVPVVHIVGAPRLTSQRKGELLHHTLGDGEFCHFMRMSAPVSVAQASLTPENALAEIDRVIEEVMYSSRPGYLLLPSDVPALPVSTRAHALPARQPPFSPSSLEAFTAAAQTQLRGANRVSLLADFLADRFKVKKALEQWMEEVPLGTSTLLMGKGLFNEQQAHFAGTYSGAASAPSTKEAIEGADVVITVGVKFTDTITAGFYQQRPSGNASTSALFAARAIRSSITGRSKNGQRDAPPPPLNLAFRPGRLILLNTTHCRWSRDNSLGQYAFWQQIQDSLQPGDVLVAEQGTACFAAAALNLPQDLQFVVQPLWGSIGYTLAAA

SEQ ID NO: 50770 - protein, 1116 aa, Xanthomonas campestris pv. campestris str. ATCC 33913
MNAVPALQADAEQSAVVADQLWYKDAIIYQVHVKSFFDSNDDGIGDFPGLISKLDYIAELGVDTIWLLPFYPSPRRDDGYDIAEYMAVHPDYGTIADFEQLVAQAHARGIRIVTELVINHTSDQHPWFQRARNAPAGSPERDFYVWSDTDQEYEGTRIIFCDTEKSNWTWDPVAGQYFWHRFYSHQPDLNFDNPAVLESVLEVMRFWLDRGVDGLRLDAVPYLIERSGTSNENLPETHAILRKIRATLDAEYPDRMLLAEANMWPEDTQQYFGQNADECHMAFHFPLMPRMYMAIAREDRFPITDIMRQTPEIPETCQWAIFLRNHDELTLEMVTDSERDYLWQTYASDRRARINLGIRRRLAPLLERDRRRIELMTSLLLTMPGTPVLYYGDEIGMGDNIHLGDRDGVRTPMQWSIDRNGGFSRADPAALVLPPVMDPLYGFQAVNVEAQIRDQHSLLTWTRRVLSVRKRYQAFGRGTLRFLYPGNRRMLAYLRCYQDETVLCVANLSHTLQAVELDLSEFEGRVPVDIIGGGSFPPIGRLTYLLTVPPFGFYAFQLVSEGTLPDWHVPSPVPLPDYRTLVLRSDTEESAALLPHLATLEGEILPAWLSARRWFSAKDQALKSVRISRRTPLPGDEPMSLLELDVELEDGHHECYMLPVGIVWEREHPSTLAEQLALARVRQGREVGYLTDAFALKPMVRGVIDALRHDAALDFHDGDDASQQGQVRFESTPALAALEIPDDPEIRWLSAEQSNSSLVVADKAVFKLLRHVATGANPEIEIGRRLTEMGYANAAPLLGSVSRVDAQGTITTIALLQGFIRNQGDAWRWTLDHLARSFDEYATAQTDEARNEAVAGYDAFAAVVGKRLAELHEALSRSTDDADFAPQRIDLPTANDVVGGVARQVEEMWETVHARLGATDDAAEREALESVLAERPQLDALLAKAPSVLAESLLTRVHGDFHLGQILVAFDDVVLIDFEGEPAKPLAERRAKASPLRDVAGFLRSLDYASEVSARGEEGTAARAGVGVDAHLDDFLVEFRRRSTQSFLDAYHAVLDASAHPWIAPAAFNAATLLFLVEKACYEVRYEAANRPGWLMVPIQGLRRILQRARAGAGDT

SEQ ID NO: 50771 - protein, 464 aa, Glycine max
MEGASWNSSVCVAPFLSKTYDMVDDPSTDLVVSWGENNNSFVVWNVPQFATDILPNHFKHNNFSSFVRQLNAYGFRKVDPDRWEFANEGFLRGEKQLLKSISRRKSAHVNGSQQASQVHKSAAGACVEVGKFGLEEEVERLKRDKNVLMQELVRLRQKQQGTDNQLQNVGQRVQSMEQRQQQMMSFLAKAMQSPGFLAQFVQQQNESSKHIPGSNKKRRLQRQEEDSLATKDLHSSLDGHIVKYQSSINEAAKALFRQILQINNSTTQSSIKNPDVFLIDDIPSAIASDSSSSSTQVSNVMVPPISELTSMEVGSQFPLSCMPSNISEVQSSPAVLGFCRSQGMETESSLLNHELNVMGADTRNMGEIDMMSTVLDEADEADHFSPDTDGISKLPEISDEFWELFLRPSPLTEDTEETKCSSLGCGLTEDQGLPSEMGNKQENFDTIQHVDCLTQQMGLHALEY

SEQ ID NO: 50772 - protein, 190 aa, Triticum aestivum
IVIRLTIGRIGDVACSRPPPRDRGRGRGLGKKKAEEDKEKQEELVTGMEKVSVEEPEVKKEEHEDGEKKETLFSKLHRSSSSSSLSSDEEEEEVIDDNGEVIKRKKKKGLKEKLKEKLPGHKDTEGEHVTGLPAPAAPASVQTHHDTDVVVEKIDGDVKTEAAPAVPEEEKKGFLEKIKENLPGRPLDNH

SEQ ID NO: 50773 - protein, 98 aa, Neorickettsia sennetsu
MKVGLKMLHDQVLIRPHEEKDGAGGIYIPDSAKKKPTMGLVVAVGAGAKNSNGTFQPVCVKEGDIVLYRKWAGSEVEHDGVEYVVMKETDIIAIKEGK

SEQ ID NO: 50774 - protein, 523 aa, Buchnera aphidicola (Uroleucon ambrosiae)
MAAKDVKFGNEARIKMLRGVNVLADAVKVTLGPKGRNVVLDKSFGAPSITKDGVSVAREIELEDKFENMGAQMVKEVASKANDAAGDGTTTATLLAQSIVNEGLKAVAAGMNPMDLKRGIDKAVISAVEELKNLSVPCSDSKAITQVGTISANADEKVGALIAEAMEKVGNDGVITVEEGTGLQNELEVVKGMQFDRGYLSPYFINKPETGIVELENPYILMADKKISNVREMLPILESVAKSGKPLLIISEDLEGEALATLVVNSMRGIVKVAAVKAPGFGDRRKAMLQDISILTGGSVISEELAMELEKSTLEDLGQAKRVVISKDTTTIIGGIGEKHTIQSRISQIRQEIQEATSDYDKEKLNERLAKLSGGVAVLKVGAATEVEMKEKKARVEDALHATRAAVEEGVVAGGGVALVRVAGKISHLSGQNEDQNVGIRVALRAMEAPLRQIVSNSGEEPSVVTNNVKDGKGNYGYNAASDQYGDMIDFGILDPTKVTRSALQYAASVAGLMITTECMVTD

SEQ ID NO: 50775 - protein, 93 aa, Lactobacillus zeae
MLKPLGDRVIVEVVEEEEQTVGGIVLANNAKQKPQTGKVVAVGEGALTPEGKRLPMAVKVGDTVLYDKYAGSEVKYEGQDYLVLHEKDIMAIA

SEQ ID NO: 50776 - protein, 523 aa, Buchnera aphidicola (Uroleucon ambrosiae)
MAAKDVKFGNEARIKMLRGVNVLADAVKVTLGPKGRNVVLDKSFGAPSITKDGVSVAREIELEDKFENMGAQMVKEVASKANDAAGDGTTTATLLAQSIVNEGLKAVAAGMNPMDLKRGIDKAVISAVEELKNLSVPCSDSKAITQVGTISANADEKVGALIAEAMEKVGNDGVITVEEGTGLQNELEVVKGMQFDRGYLSSYFINKPETGIVELENPYILMADKKISNVREMLPILESVAKSGKPLLIISEDLEGEALATLVVNSMRGIVKVAAVKAPGFGDRRKAMLQDISILTGGSVISEELAMELEKSTLEDLGQAKRVVISNDTTTIIGGIGEKHTIQSRISQIRQEIQEATSDYDKEKLNERLAKLSGGVAVLKVGAATEVEMKEKKARVEDALHATRAAVEEGVVAGGGVALVRVAGKISHLRGQNEDQNVGIRVALRAMEAPLRQIVSNSGEEPSVVTNNVKDGKGNYGYNAASDQYGDMIGFGILDPTKVTRSALQYAASVAGLMITTECMVTD

SEQ ID NO: 50777 - protein, 434 aa, Geobacter metallireducens GS-15
MRNELVTPGAGELTYEIRNIVNVAEKLQKHGVKINWENIGDPIVKGEEIPRWMKEIVANEVMENDTWGYCHTRGVLETREFICGLTNNRGGARITPDDIIFFNGLGDAISTVYGNLRHESRILMPSPTYTTHSIGEAAHAQASPVCYRLDPANNWFPDLEDMENHVRYNPQISGILLINPDNPTGMVFSRETLEKIVAIARKYELFIIADEVYNNITYNGQTTVPISDVIGDVPAIAMKGISKEIPWPGSRCGWIEVYNGAKDDQFRKYINSILSAKMNEVCSTTLPQKCIPAIMKHPEYQTYLQERIRRYEKMSTITFDCLREVPELMVNRTNGAFYMSVAFRDGLLTNGQSLPIENAEVRELVEGLVNAPGVSPDKRFVYYLLASTGICIVPLSSFNTPLQGFRVTLLEKDEAECLRIYQTLAKKIAEYLKS

SEQ ID NO: 50778 - protein, 523 aa, Buchnera aphidicola (Uroleucon ambrosiae)
  misc_feature (310)..(310): Xaa can be any naturally occurring amino acid
  unsure (1)..(523): unsure at all Xaa locations
MAAKDVKFGNEARIKMLRGVNVLADAVKVTLGPKGRNVVLDKSFGAPSITKDGVSVAREIELEDKFENMGAQMVKEVASKANDAAGDGTTTATLLAQSIVNEGLKAVAAGMNPMDLKRGIDKAVISAVEELKNLSVPCSDSKAITQVGTISANADEKVGALIAEAMEKVGNDGVITVEEGTGLQNELEVVKGMQFDRGYLSPYFINKPETGIVELENPYILMADKKISNVREMLPILESVAKSGKPLLIISEDLEGEALATLVVNSMRGIVKVAAVKAPGFGDRRKAMLQDISILTGGSVISEELAMELXKSTLEDLGQAKRVVISKDTTTIIGGIGEKHTIQSRISQIRQEIQEATSDYDKEKLNERLAKLSGGVAVLKVGAATEVEMKEKKARVEDALHATRAAVEEGVVAGGGVALVRVAGKISHLRGQNEDQNVGIRVALRAMEAPLRQIVSNSGEEPSVVTNNVKDGKGNYGYNAASDQYGDMIDFGILDPTKVTRSALQYAASVAGLMITTECMVTD

SEQ ID NO: 50779 - protein, 348 aa, Zea mays
  misc_feature (69)..(69): Xaa can be any naturally occurring amino acid
  misc_feature (98)..(98): Xaa can be any naturally occurring amino acid
  misc_feature (113)..(113): Xaa can be any naturally occurring amino acid
  misc_feature (132)..(132): Xaa can be any naturally occurring amino acid
  unsure (1)..(348): unsure at all Xaa locations
GCQQQRSRTRPRTAHGRTPPGALVSLSVSRLRPPQQRGARGGGALAILVSIPAAGVPFPPLAVARASRXRAPEPEPRRESRVASASPPPPETPSGRNXDEGNRRQRLRRTPLXVKCAGDRSVEEQPEHAGGXLVEGQALKMSSTVPKSSNIFWHDCLVGKTDRQKLLNQKGCVVWITGLSGSGKSTLACTLGRELHTRGKLAYVLDGDNLRHGLNKDLGFKAEDRAENIRRVGEVAKLFSDAGLVCIASLISPYRRDRESCRALLSDGSFIEVFLNMSLELCEARDPKGLYKLARAGKIKGFTGIDDPYEAPLNCEIEIKEIDGVCPSPSDMAGQVVTYLEEKGFLHE

SEQ ID NO: 50780 - protein, 154 aa, Zea mays
MSLVRRSNVFDPFSMDLWDPFDTMFRSIVPSAVSTNSGTATFASARIDWKETPEAHVFKADLPGVKKEEVKVEVEDGNVLVISGQRSREKEDKDDKWHRVERSSGQFVRRFRLPENAKMDQVKAGLENGVLTVTVPKAEEKKPEVTAMAIEISG

SEQ ID NO: 50781 - protein, 381 aa, Streptomyces avermitilis MA-4680
MTVMEQRGAYRPTPPPAWQPRTDPAPLLPDALPHRVLGTEAAAEADPLLLRRLYAELVRGRRYNTQATALTKQGRLAVYPSSTGQEACEVAAALVLEERDWLFPSYRDTLAAVARGLDPVQALTLLRGDWHTGYDPREHRIAPLCTPLATQLPHAVGLAHAARLKGDDVVALALVGDGGTSEGDFHEALNFAAVWQAPVVFLVQNNGFAISVPLAKQTAAPSLAHKAVGYGMPGRLVDGNDAAAVHEVLSDAVAHARAGGGPTLVEAVTYRIDAHTNADDATRYRGDSEVEAWRAHDPIALLEHELTERGLLDEDGIRAAREDAEAMAADLRARMNQDPALDPMDLFAHVYAEPTPQLREQEAQLRAELAAEADGPQGVGR

SEQ ID NO: 50782 - protein, 455 aa, Xanthomonas campestris pv. vesicatoria str. 85-10
MSRLVVVSNRVAVPGETRAGGLAVGLLAALKERGGMWFGWSGKTVRGDSGGMHEQTEGDITFVTMDLNKRDIDSYYNGFANRTLWPLLHFRLDLVDYDRATREGYMRVNRLFAEKLAPLLKDSDTLWIHDYHMIPLGAMLRELGVGCKMGFFLHVPMPSADLVQAMPDHARLFSTFYAYDLVGFQTQRDAERFKAYVRLFGGGRILEGDLVEGPGGRRFTASSFPIGIDTDLIAHQAKASAGKQAVRDLRESLRGRQLAIGVDRLDYSKGLPERFQGFERYLERYPDQSGSLTYLQIAPVSRGDVTEYRQLRSQLEQIAGHINGGHAEPDWTPLRYVNQNFSHATLTGFYRAASVCLVTPLRDGMNLVAKEFVAAQDPADPGVLVLSLFAGAADEMKEALLVNPHDLDGVADAIATAASMPLASRIERWHAMMDHLRKNNINHWRQRYLQALSEV

SEQ ID NO: 50783 - protein, 249 aa, Medicago sativa
MPIRNIAVGTPQEATHPDTLKAGLAEFISTFIFVFAGSGSGIAYNKLTNDGAATPAGLISASIAHAFALFVAVSVGANISGGHVNPAVFGAFVGGNITLLRGIVYIIAQLLGSIVCSALLVFVTASSVPAFGLSEGVGVGPALVLEIVMTFGLVYTVYATAVDPKKGNIGIIAPIAIGFIVGANILVGGAFTGASMNPAVSFGPAVVSWSWSNHWVYWAGPLIGGGIAGLVYEVLFINSTHEQLPTTDY

SEQ ID NO: 50784 - protein, 148 aa, Xanthomonas campestris pv. vesicatoria str. 85-10
MRAGLNRADQSPVAPPAARATIVFDGVCLLCNGWVKFLLRHDRRGRYRFAAMQGQAGRALLQQHGLDPDDPLSFLLVDATGAWTDSDAIVRVLAGLGGLWRLSGVLRLIPRRVRDLGYRLIARNRYRWFGRSDHCMLPTPEQHARFLD

SEQ ID NO: 50785 - protein, 240 aa, Nostoc sp. PCC 7120
MKKTVEVLPDQTALIARSLDLILTKLDTAIKQQGRFTIALSGGSTPKPLYEAIAAQKLPWDKIHVFWGDERYVSPDHPDSNELMARTAWLDRVDIPAENIHAVPTLDNNPAVSAAKYEQHLQTFFNSAPGEFPALDVVLLGMGDDAHTASLFPHTEALQVRDRLITVGNKDGNPRITFTYPFINAASSVIFVVAGANKRPALAQVFAPSADDLAYPSRFIQPQGELLWLLDAAAGAELSV

SEQ ID NO: 50786 - protein, 245 aa, Glycine max
EKDTLNSQARLVLDNNHKMINFEETELRLGLPGNDSALKGSAAKRGFSETASVDLKLNLSSCINDSASDSPSSMSTEKPKENKTTTAEPPPANDPAKPPAKAQVVGWPPVRSFRKNIVQRNSNEEEAEKSTKNAFVKVSMDGAPYLRKVDIKLYKSYQELSDALAKMFSSFTIEKCGSQGMKDFMNETNGSDYVPTYEDKDGDWMLVGDVPWEMFVESCKRLRIMKGSEAIGLAPRAVEKCKNRS

SEQ ID NO: 50787 - protein, 247 aa, Burkholderia fungorum LB400
MHDMTRLNGKTAVITGGATGIGRAAARRFIEEGAFVFIYGRRQEALDAAVAELGPNARAVKGSVSDEADLDRLYAAVKAERGTLDIVFANAGAGSPLALGKITAQHIDETFDTNVKGTIFTVQKALPLMGQGGSIILTGSSAGTTGAPGMSAYSASKAAVRNLARTWAEDLKGTGIRVNVLSPGATATELAKAALGEEGQKVYAAMTPLQRMADPSEIGAVAAFLASSDSSFMTASEVAVDGGLAQL

SEQ ID NO: 50788 - protein, 548 aa, Pseudomonas fluorescens PfO-1
MAAKEVKFGDSARKKMLVGVNVLADAVKATLGPKGRNVILEKSFGAPTITKDGVSVAKEIELEDRFENMGAQLVKDVASRANDDAGDGTTTATVLAQSIVNEGLKAVAAGMNPMDLKRGIDKATIAVVAELKKLSAPCTDTKAIAQVGTISANSDNSIGDIIAEAMEKVGKEGVITVEEGSGLENELSVVEGMQFDRGYLSPYFVNKPDTMVAELEGALILLVDKKISNIREMLPVLEAVAKAGRPLLIVAEDVEGEALATLVVNNMRGIVKVAAVKAPGFGDRRKAMLQDIAVLTGGTVISEEIGLSLESTTLEHLGSAKRVTLSKENTIIVDGAGNDGDIQARIAQIRAQVAETSSDYDREKLQERLAKLSGGVAVIKVGAGSEVEMKEKKARVEDALHATRAAVEEGVVPGGGVALIRALNAIINLKGDNADQDVGIAVLRRAVEAPLRQIAANSGDEPSVVVNEVKNGKGNFGYNAATGEYGDMIEMGILDPTKVTRSALQAASSIGGLILTTEAAVADAPKKDGAAGGGMPDMGGMGGMGGMM

SEQ ID NO: 50789 - protein, 97 aa, Pseudomonas fluorescens PfO-1
MKLRPLHDRVVIRRSEEEKKTAGGIVLPGSAAEKANHGEILAVGPGKALESGEVRALSVKVGDKVVFGPYSGSNTVKVDGEDLLVMSENEILAVIEG

SEQ ID NO: 50790 - protein, 359 aa, Brassica napus
MEKYELVKDIGAGNFGVARLMKVKDSKELVAMKYIERGPKIDENVAREIYNHRSLRHPNIIRFKEVVLTPTHLAIAMEYAAGGELFERICGAGRFSEDEARYFFQQLISGVSYCHAMQICHRDLKLENTLLDGSPAPRLKICDFGYSKSSLLHSRPKSTVGTPAYIAPEVLSRREYDGKMADVWSCGVTLYVMLVGAYPFEDQEDPKNFRKTIQKIMAVQYKIPDYVHISQDCKHLLSRIFVANSLKRITIAEIKKHPWFTKNLPRELTETAQAAYFKKENPTFSAQTAEEIMKIVDDAKTPPPVSRSIGGFGWGGEGDLEGKEEEEVDEEEVEEEEDEEDEYDKTVKEVHASGEVRIS

SEQ ID NO: 50791 - protein, 311 aa, Synechococcus elongatus PCC 6301
MNVQERRNLNAAVERHTSDHVSWYLSSIGRIPLLTAEEEVELSRKVQLMMALLENPDAESNSENQAVLQAGQRAKTKMLKANLRLVVSVAKKYQNQGLELLDLIQEGSLGLERAVEKFDPALGYKFSTYAYWWIRQSMTRAIDNHARTIRLPIHVSEKISRIKKMTRELTHQLKRLPSRAEIAEALKLPLQDVEMLLSQSTPCTSLDAQARGDDGRSFLGDLIPDPKSLEPMDAMDRHIQHEQISTWLAHLTEREQQVLQLRFGLHDGEQHTLAEIGRRLNVSRERIRQVEARALQKLRVLSQQPLCPEAC

SEQ ID NO: 50792 - protein, 225 aa, Bacillus cereus ATCC 14579
MIDILLVDDEPRMLELLTLYLTPIGYNCVCATSGEEAILHIENQNFKFVLLDIMMPKMDGWETCKKIRSFSNIPIIMVTARDQTVDVVQGLKIGADDYVTKPFHEEELFARIEAVLRRTNEHKQIQYHGIVWDETKHFVSVHNEELLLTPIEFSLLGLFLRHVNYVLNRDQLIERIWGLNTNTEDRTVDSHIRNLRDKLRKANFPIDHHLKTVYGVGYRWINTEQ

SEQ ID NO: 50793 - protein, 349 aa, Porphyra purpurea
MQTTIQKEEAPNRETLLTPRFYTTDFEEMASMNISENEQDFFAILEEFRADYNSQHFIRGEEFNQSWSNLETKTKSLFIEFLERSCTAEFSGFLLYKELSRKLKDSNPIIAECFLLMSRDEARHAGFLNKAIGDFNLSLDLGFLTKTRKYTFFSPKFIFYATYLSEKIGYWRYITIYRHMEQYPEHRIYPIFKFFENWCQDENRHGDFFAALLKSQPHFLNDWKAKMWCRFFLLSVFATMYLNDFQRIDFYNAIGLDSRQYDMQVIRKTNESAARVFPVALDVDNPKFFKYLDSCACNNRALIDIDKKGSQPLVKTFMKAPLYMSLILNLIKIYLIKPIDSQAVWNTVR

SEQ ID NO: 50794 - protein, 541 aa, Nocardia farcinica IFM 10152
MAKTIAYDEEARRGLERGLNSLADAVKVTLGPKGRNVVLEKKWGAPTITNDGVSIAKEIELEDPYEKIGAELVKEVAKKTDDVAGDGTTTATVLAQALVREGLRNVAAGANPLGLKRGIEKAVEAVTAKLLDTAKEVETKEQIAATAGISAGDASIGELIAEAMDKVGKEGVITVEESNTFGLQLELTEGMRFDKGYISGYFVTDPERQEAVLEDPYILLVGSKVSTVKDLLPLLEKVIQAGKPLLIIAEDVEGEALSTLVVNKIRGTFKSVAVKAPGFGDRRKAQLADIAILTGGEVISEEVGLSLETAGIELLGQARKVVVTKDETTIVEGAGDAEAIKGRVAQIRTEIENSDSDYDREKLQERLAKLAGGVAVIKAGAATEVELKERKHRIEDAVRNAKAAVEEGIVAGGGVALLQAAPALDELKLTGDEATGANIVRVALSAPLKQIAFNAGLEPGVVAEKVSNLEAGHGLNADSGEYEDLLAAGVADPVKVTRSALQNAASIAALFLTTEAVVADKPEKAAAPAGDPTGGMGGMDF

SEQ ID NO: 50795 - protein, 395 aa, Moorella thermoacetica ATCC 39073
MYGVKERISRAIEEIKDQIIQVAEAIFDHPETGNEEYFAADLLTGILAEKGFKITRPLCQLPTAFRAELATGTPGPRIGLLAEYDALPELGHACGHNLIAAGSLGAALGLAAAVRELRGTIVVLGTPAEESHGAKVLLAREGALDDLDVAMMFHPGDTNAVEVTSQALEALEFIFEGRAAHAASSPEEGINALEAVIQLFNNIHALRPYLKDEASIHGIITEGGVSPNIIPERAVARFYLRASTREALNRVARRVEDCATAAALATGTRFWYHNYEPSYEAMLVNRTLAGAWQRNLQELGVTDLAPACRSRGSLDMGNVSRVVPAIHPYLSLNAGKLVPHTREFARAVRGEAGRRLVILAARALAWTAVDVMLDRELLAQIKDEFAGWQAGNVAT

SEQ ID NO: 50796 - protein, 203 aa, Zea mays
MASTSSSTPAAEVEERGRKRKRAAGAAPTQPSEWRTRREHEIYSSRLLEAIRLVRAGPSSAAAAKAAPTRSRAVREAADRALAVAARGRTHWSRAILASRRCRRLQAAHRARLRAPASPPPRHGASAAKGTAALPPVARKAMVLGRLVPGCRKLSFPTLLAETTDYIAALQMQVRAMTALAEALSAVSSSSSGAGSSPSSSPA

SEQ ID NO: 50797 - protein, 877 aa, Vibrio vulnificus CMCP6
MNEKYAALKSNVSMLGHLLGNTIQEAHGDEILEKVETIRKLSKSARAGNQADRNNLIEEIKSLPDEQLTPVARAFNQFLNLTNIAEQYHTISRHCDAHVCEPDAINTLFAKLGQNGINKLDTAQAIRELNIELVLTAHPTEITRRTMINKLVKINECLSKLELSDLSYKERHKTEKRLEQLIAQSWHSDVIRKQRPTPLDEAKWGFAVVENSLWEAVPDFLRELDEKLKDYLDQGLPIDARPVHFSSWMGGDRDGNPFVTHTVTREVLLLSRWKAADLYLKDINELISELSMTKCNDTVRQLAGEDEHEPYRAILKQLRTLLSDTKEILDAKINGQKLAVKAPLQSVEQLWDPLFACYQSLRECGMSMIAEGSLLDTLRRVKAFGVHLVRLDIRQESTRHADVLSELTRYLGIGDYNHWSEQDKIAFLTNELASKRPLLPRDWQPSEQVKEVLDTCKIIAAQSREAFGAYVISMAKTASDVLAVHLLLQESGCPYRMDVCPLFETLDDLNNAEAVIKQLMSIDLYRGFIQNHQMVMIGYSDSAKDAGVMAAGWAQYHAMEALVNVAEQEGIELTLFHGRGGTIGRGGAPAHAALLSQPPKSLKGGLRVTEQGEMIRFKLGLPDVAVNSFNMYASAILEANLLPPPEPKQEWRDLMEVLSQVSCEAYRSVVRGEPDFVPYFRQATPELELGKLPLGSRPAKRNPNGGVESLRAIPWIFSWSQNRLLLPAWLGAGEAIQYSIDKGHQALLEEMCREWPFFSTRLGMLEMVYLKCNSEISRYYDERLADKSLLPLGDRLRDQLQSDIKAVLNVENNENLMQSDPWGQESIRLRNIYIEPLNMLQAELLYRTRQAGVVSEALEEALMVTIAGIAAGMRNTG

SEQ ID NO: 50798 - protein, 94 aa, Geobacillus thermoglucosidasius
MIKPLGDRVVIEIVETEEKTASGIVLPDTAKEKPQEGKVVAVGKGRVLDNGQRVAPEVEVGDRIIFSKYAGTEVKYDGKEYLILRESDILAVIG

SEQ ID NO: 50799 - protein, 406 aa, Streptomyces avermitilis MA-4680
MTVESTAARKPRRSAGTKSAAAKRTSPGAKKSPSTTGAEHELIQLLTPDGRRVKNPEYDAYVADITPEELRGLYRDMVLSRRFDAEATSLQRQGELGLWASMLGQEAAQIGSGRATRDDDYVFPTYREHGVAWCRGVDPTNLLGMFRGVNNGGWDPNSNNFHLYTIVIGSQTLHATGYAMGIAKDGADSAVIAYFGDGASSQGDVAESFTFSAVYNAPVVFFCQNNQWAISEPTEKQTRVPLYQRAQGYGFPGVRVDGNDVLACLAVTKWALERARRGEGPTLVEAFTYRMGAHTTSDDPTKYRADEEREAWEAKDPILRLRTYLEASNHADEGFFAELEVESEALGRRVREVVRAMPDPDHFAIFENVYADGHALVDEERAQFAAYQASFTTEPDGGSAAGQGGN

SEQ ID NO: 50800 - protein, 343 aa, Brassica napus
METSAASVTVSVAIVIVLWWVWRTLNWVWFKPKKLESYLRRQGLSGTPYTPLVGDVRRDYTMSMEARSKPIKITDDIVPRVVPFPSHMLKTYGRTFFTWRGPIPTITITDPEQIKEVFNKIYDFQKPHSFPLGRLIATGLFSYDGDKWAKHRRIINPAFHLEKIKNMVPAFHQSCSEVVGKWDKLVSDKGSSCEVDVWLGLVSMTADVISRTAFGSSYKEGQRIFELQAELALLLTQAFRRIFIPGYRYYPTKGNRRMKAAAREVQDILRGIVNKRLRARESGEAPSEDLLGTLLESNLGQTKGTGMSIADVIEECKLFYFAGQETTSVLLVWTMVMLSQHQD

SEQ ID NO: 50801 - protein, 510 aa, Camellia sinensis
MALDTVFLLRELSFATLVILITHIFMRSILSKPLRMLPPGPTGLPLIGAIPHLGSMPHVALAKMAKIYGPIVYLKMGTCGMVVASTPDSARAFLKTLDLNFSNRPPNAGATHLAYGAQDMVFADYGPRWKLLRKLSNLHMLGGKALENWAQVRSSELGHMLKAMYDLSCRGEPVVVAEMLCYAMANMIGQVILSRRVFETKGSESNEFKDMVVELMTTAGYFNIGDFIPSIAWMDLQGIERGMKRLHKKFDVLITKMIEEHKASAYQRKETPDFLDVFMAQQKNPGEEKAQHDTIMHYSGPYSLPGTDTSSSIIEWALAEMLKDPKILNRAHDEMDRVIGRNRRLQESDLPKLPYLQAICKETFRMHPSTPLNLPRVAAQTCRVNGYYIPKNTRLSVNIWAIGRDPDVWERPLEFIPDRFLSGKNAKTDPRGNDFELIPFGAGRRICAGTRMGIVLVEYILGSLVHSFDWKLADDGVELNMDESFGLALQKAAPLSAMVSPRLPPNAYAA

SEQ ID NO: 50802 - protein, 483 aa, Arabidopsis thaliana
MADLLRKVKSIKKKQDQSNHQALILGKYEMGRLLGHGTFAKVYLARNAQSGESVAIKVIDKEKVLKSGLIAHIKREISILRRVRHPNIVQLFEVMATKSKIYFVMEYVKGGELFNKVAKGRLKEEMARKYFQQLISAVSFCHFRGVYHRDLKPENLLLDENGNLKVSDFGLSAVSDQIRQDGLFHTFCGTPAYVAPEVLARKGYDGAKVDIWSCGVILFVLMAGFLPFHDRNVMAMYKKIYRGDFRCPRWFPVEINRLLIRMLETKPERRFTMPDIMETSWFKKGFKHIKFYVEDDHQLCNVADDDEIESIESVSGRSSTVSEPEDFESFDGRRRGGSMPRPASLNAFDLISFSPGFDLSGLFEDDGEGSRFVSGAPVGQIISKLEEIARIVSFTVRKKDCKVSLEGSREGSMKGPLSIAAEIFELTPALVVVEVKKKGGDKMEYDEFCNKELKPKLQNLSSENGQRVSGSRSLPSFLLSDTD

SEQ ID NO: 50803 - protein, 248 aa, Zea mays
MAMDAERRQAELIAQFSSQAVALSSAQQLAALVLEATSHPALFAFSELLALPALSMLAGTQYSSSLDLLRLFAYGTLKDYKNNSGSLPALLPDQVRKLKQLSVLTLAESTKILPYDQLMQELDVSNVRELEDFLINECMYSGIVRGKLDQLRRCFEVQFAAGRDLTPDQLNNMIEILSDWLGTSDRLLHQIQEKIKWADTMSEVNKKHQKEFEDRVEEAKKSIKKLNNLSRQTLTYGGMTSFSLNLEE

SEQ ID NO: 50804 - protein, 359 aa, Zea mays
MDKYEAVRDIGSGNFGVARLMRNRETRELVAVKLIERGHRIDENVYREIVNHRSLRHPNIIQFIEVILTPTHLAIVMEYAAGGELFDRIVDRGRFSEDETRYFFQQLICGVSYCHHMQICHRDLKLENVLLDGSPAPRLKICDFGYSKSSVLHSRPKSAVGTPAYIAPEVLSRREYDGKLADVWSCGVTLFVMLVGAYPFEDQDDPKNIRKTIQRIAAIQYNIPDNIRISDDCRQLISRIFVSNPLRRITMREIKSHPWFLKNLPRELTEAVQLSYFRRDNSVSAFSDQTTEEIMKIVKEARTLPKSSRSGYGYSEECSDEEEKEVESEPKEEEEEAECDKTVREVRESGELDMTSLHI

SEQ ID NO: 50805 - protein, 298 aa, Bacillus cereus ATCC 14579
MPNIAVVGSISMDLVAVSKKRPKAGETVIGEAFHTIPGGKGANQAVAAARLGANVAMVGAVGNDDYGTVVRKNLENERIFIDYVVPVTDRTTGIAHIVLAEEDNSIVVVQGANALVNKSVVDRSKDLLVKADMVVLQLEIPLETVKYVLAICEEHNIPVMLNPAPAQVLSEEILEKATYITPNEHECRIVLDDFTSPIEDLLAKYPNKLLMTEGSNGVRFHNGTEIVHVPSIAVDVVDTTGAGDTFNGALAVALSEGETLQKAIRFANIAGGLSVTKLGAQGGMPTRDRVREVQVIVG

SEQ ID NO: 50806 - protein, 435 aa, Arabidopsis thaliana
MTIFARDLIYRIETKVLLPLFLVHLLPYVTCQQESESVDRNRKTNFPTETVIAIIVLAIFISLSMVACFLHKTFYRAEVEAASQEVFHSRARRGLEKELVESFPIFLYSEVKGLKIGKGGVECAICLSEFVDKETLRWMPPCSHTFHANCIDVWLSSQSTCPACRANLSLKPGQDVLHSRARRGLEKEVIESFPTFLYSEVKGLKIGKGGVECAICLSEFEDQETLRWMPPCSHTFHANCIDVWLSSWSTCPVCRANLSLKPGESYPYLNMDVETGGVQKLPNERSLTGNSVTTRSRSTGLLSSWRMAEIFVPRSHSTGHSLVQQLGENLDRFTLQLPEEVQRQLVSLNLIRRSHIVLPQAVSSRQGYRSGSVGSERGGFSQGRQTHRRALSMSFSFSFQTASVRSIHDMNDQAQAKDKYFGERSFERLMPEEKV

SEQ ID NO: 50807 - protein, 171 aa, Glycine max
  misc_feature (151)..(151): Xaa can be any naturally occurring amino acid
  unsure (1)..(171): unsure at all Xaa locations
MTFTAEVACSFFGLAYRNRKPFTLSLQTTLLPLLRRTTTHSHSQSLTFPLRPSRRFSVPATTTAPPQSEDSDVSTLIPPDNRIPATIITGFLGSGKTTLLNHILTAEHGKRIAVIENEFGEIDIDGSLVAAKAAGAEDIMMLNNGCLCCTXRGDLVRMISELVAKKKGKFD

SEQ ID NO: 50808 - protein, 249 aa, Triticum aestivum
ARRHPGRPPAFAACREEARGEEELPCASHVGEVFVDIDKRGLEAEEPRIASGCDKEMALSTANSIFSTLNRYSKLTGLVVCERRCDSVGIPALSSSLNLSLGRIKQSFVLTDRHLPDMPIVYASDAFLSLTGYSREEILGCNCRFLNGPGTSAEVLEEINRHICREEACTVHLLNYRKDGSTFRDLLHVSPIRNSSGKVAFHVWVHLDESAKHDFSGLTPEVWQLGAVGAVRVAVRSLSASGSLLRPSQ

SEQ ID NO: 50809 - protein, 215 aa, Bacillus cereus ATCC 14579
MKFFIDTANINEIKEANELGVLAGVTTNPSLVAKEGVDFHERIREICNVVEGPVSAEVISLEADKMIEEGKELAKIAPNVVVKVPMTTEGLKAVKAFSDLGIRTNVTLVFSAVQALLAARAGATYVSPFLGRLDDIGHNGMDLIRQIAEIFAIHGIETEIIAASVRHSVHVTDAALNGAHIATIPANVIASLVKHPLTDQGIEKFLADWEKTQEK

SEQ ID NO: 50810 - protein, 258 aa, Brassica napus
MTEARHRKWHVFQTKDELSVAMAKYTAHLSAKFCKEKGLFTVVLSGGGLIDWLCKLLEPPYKDSIEWSKWHVFWVDERVCAYEDPDSNYKLAMDGFLSKVGIPNEHIYAIDKHYAADGNAEHCAALYEECLRNLVKQDIIPLCPNGKYPQFDLQLLGMGPDGHMASLFPGHPQINVKDKWVTYITDSPKLPPRRITFTLPVINSASYNLMAVCDDHTEQCPRSIADIFKHNNLALPAAHLTAHVETMWYLDKAAASLL

SEQ ID NO: 50811 - protein, 320 aa, Lactobacillus johnsonii NCC 533
MKLGIIGSGKIVHDFLSIADQIPDLELAALSTTKKSHQIGLELQEKYNISKLYDNNTDLFNDANIDTVYVAVPNSLHFSIAKAALEAGKNVICEKPFVATTDEARELKEIADKNQVIIVEAITNIYLENFKFIEDNLAKIAPIHVVNLNYTQYSSRYDAFLEGDIQPAFDPKKDGGALMDLGIYNLHIIIKLFGKPDSVKYFPTIQKNIDTSGILHLGYSDKQASSIAAKDSFSPNVSTIEGEKGALIIYGHPNEMPKVGIQLLGEEPKVVNHNKYSHRMIAEFIEFTKIIDQHDFTAADQAFTHSLNTLAVLQEAKNQR

SEQ ID NO: 50812 - protein, 132 aa, Brassica napus
  misc_feature (12)..(12): Xaa can be any naturally occurring amino acid
  misc_feature (26)..(28): Xaa can be any naturally occurring amino acid
  misc_feature (36)..(37): Xaa can be any naturally occurring amino acid
  misc_feature (44)..(44): Xaa can be any naturally occurring amino acid
  misc_feature (54)..(54): Xaa can be any naturally occurring amino acid
  misc_feature (60)..(60): Xaa can be any naturally occurring amino acid
  misc_feature (62)..(63): Xaa can be any naturally occurring amino acid
  misc_feature (70)..(70): Xaa can be any naturally occurring amino acid
  misc_feature (72)..(72): Xaa can be any naturally occurring amino acid
  misc_feature (74)..(74): Xaa can be any naturally occurring amino acid
  misc_feature (76)..(76): Xaa can be any naturally occurring amino acid
  misc_feature (78)..(79): Xaa can be any naturally occurring amino acid
  misc_feature (83)..(83): Xaa can be any naturally occurring amino acid
  misc_feature (85)..(85): Xaa can be any naturally occurring amino acid
  misc_feature (87)..(87): Xaa can be any naturally occurring amino acid
  misc_feature (90)..(90): Xaa can be any naturally occurring amino acid
  misc_feature (94)..(94): Xaa can be any naturally occurring amino acid
  misc_feature (103)..(106): Xaa can be any naturally occurring amino acid
  unsure (1)..(132): unsure at all Xaa locations
MDLLNNPPTTTXGLSETFARLKSQRXXXLIPYITAXXDPDLSTXAKALKGLDSXGSDIIXLXXLYSDPLXDXPXIXAXXRRSXLXGXSFXSIIXMVKEVYPQXXXXLDWFTYYNPDKEGWKTLRVWKFLPRG

SEQ ID NO: 50813 - protein, 428 aa, Medicago sativa subsp. X varia
MKFSEEKNVSNNPTNFEGGLDSRKVGQNRRALGVINQNLVVEGRPYPCVVNKRALSERNDVCEKKQADPVHRPITRRFAAKIASTKTSNAEGTTKRSNLAKSSSNGFGDFIFVDDEHKPVEDQPVPMALEQTEPMHSESDQMEEVEMEDIMEEPVMDIDTPDANDPLAVAEYIEDLYSYYRKVESTSCVSPNYMAQQFDINERMRAILVDWLIEVHDKFDLMHETLFLTVNLIDRFLEKQSVVRKKLQLVGLVAMLLACKYEEVSVPVVGDLILISDRAYTRKEVLEMEKVMVNALKFNISVPTAYVFMRRFLKAAQADRKLELLAFFLIELSLVEYAMLKFSPSQLAAAAVYTAQCTMYGVKQWSKTCEWHTNYSEDQLLECSSLMVDFHKKAGTGKLTGAHRKYCTSKFSYTAKCEPASFLLENEL

SEQ ID NO: 50814 - protein, 214 aa, Nostoc punctiforme PCC 73102
MGKNRFKLVIFDCDGVLVDSEPIINRIFAETLTEAGFPITHAEVTQKFIGKSLKTCLEIIEASYKKPLPKNFVELCKEREIAPLQQELQPVSGITEILEQITLPKCVASNSSHRHIQMVLKLTGLLDKFDGKLYSANDVSRPKPFPDVYLYAAEQMNTNPEDCAVIEDSVPGVQAAYAAGMTVFGYAHQSDRTALAEVGAKIVFNDMRQLAQLL

SEQ ID NO: 50815 - protein, 322 aa, Agrobacterium tumefaciens
MDKKVELIATGDVDKLRVSGCPPQEPGPGELRIRHDAIGVNYIDIYQRIGLYPLPLPAVLGVEGAGVIEAIGPDVDNIHVGDRVAYTGIPGAYSATRLLPAWRTIKLPDDISTRIAALSFLRGLTAHMLLTRTYSVKQGETLLIHAAAGGLGFVLTRWAKSLGCIVIGTTGSSEKADVARANGVDHVIVGREADVVSEIGRLTKGKGVDFAIDGIGGEMLRKTLGCVRRFGTVASIGQAAGPIPPVSVEELGPIRSLSLARPSVMAYAAEQETYHLAAKAVIAAIREGIMPEPGGEYPLSEAAQAQSDLESGRTAGSLMLVP

SEQ ID NO: 50816 - protein, 236 aa, Arabidopsis thaliana
MEFLVTVAEFSLWLLLIVLFGFLSVVVFEAWRRRHSNVSVETVTTLDDPKSIKPIPCPHITDPAEKYLSLIVPAYNEELRLPAALEETMDYLQDRASRDKSFSFEVVIVDDGSVDGTKRVAFDFIRKYTIDNIRVIPLGKNQGKGEAIRKGMLHSRGQLLLMLDADGATKVTDLEKLENQINAVAREEYSIRNPASKDMDFKIGDVQVSAFGSRAHLEEKALATSFNFRGNGIATF

SEQ ID NO: 50817 - protein, 177 aa, Haloarcula marismortui ATCC 43049
MMTEQATFAGGCFWCTESVFKQINGVTDVVSGYAGGHVADPSYEAVCREETGHAECVQLTYDPEEVSYEDLLAVHFTTHTPTTKDREGNDVGTQYRSAVFYHDEAQRETVEALIEEIEPGYDSDIVTEVEPLETFYPAEEYHQDYFEKNPDQSYCQLTIPPKIEKLEETHEELLRAD

SEQ ID NO: 50818 - protein, 434 aa, Medicago sativa subsp. X varia
MVNTSEENNSNAVMPRKFQGGMNQVGHGGGRIVGQNRRALGGINQNFVHGRPYPCVVHKRVLSEKHEICEKKQADLGHRPITRRFAAKIAGSQQSYAEKTKNSNPLNLNEFGNSIAIDDELKSPEDQPEPMTLEHTEPMHSDPLEMEEVEMEDIEGEMILDIDSCDANNSLAVVEYIEDLHAYYRKIEYLGCVSPTYMDEQLDLNERMRAILVDWLIEVHDKFDLMQETLFLTVNLIDRFLAKQNVVRKKLQLVGLVAMLLACKYEEVSVPVVSDLIHIADRAYTRKDILEMEKLMLNTLQYNMSLPTAYVFMRRFLKAAQADKKLELVAFFLVDLSLVEYEMLKFPPSLVAAAAVYTAQCTVSGFKHWNKTCEWHTNYSEDQLLECSMLMVGFHQKAGAGKLTGVHRKYGSAKFSFTAKCEPACFLLENKNQP

SEQ ID NO: 50819 - protein, 406 aa, Oryza sativa
  misc_feature (303)..(303): Xaa can be any naturally occurring amino acid
  unsure (1)..(406): unsure at all Xaa locations
MAAALCSASPAISAAAAAALGAAARRLRVRVRAASRPYCAAPAPPRAAAAVGAQSWRARRRFAASAASTTTEEEEEGAGAEVMIPPDNRIPATIITGFLGSGKTTLLNHILTAHHGKRIAVIENEYGEVDIDGSLVAAQTAGAEDIMMLNNGCLCCTVRGDLVRMIGELVDKKKGKFDHIIIETTGLANPAPIIQTFYAEDTVFNDVKLDGVVTLVDAKHARLHLDEVKPKGIVNEAVQQIAYADRIIVNKIDLVSEPEVSSLVERIRSMNRMAHLKRAEYGKVDLDYVLGIGGFDLERIESXGHEHKHDHEHHHHDHHHHDHEHKHDCVHDHHAHDHTHDPGVSSVSIVCEGEMDLEKGVHDIFQGSPERMWEPNEPRINKIVFIGKNLNGEELEKGFKDCLLKK

SEQ ID NO: 50820 - protein, 489 aa, Oryza sativa
CAPWLCWRRWRRPSSRAARRGCCFRLSIAVTAPCPPVPGSWCSAPPVLAPSPVACVRRRGDRRGFCSVRRFTGESNAAAAVEEAENGLVAGGDQQAIDFPGGKVSFVAEMNFLPESQRDRINCYRVLDDDGRTISGSRFQEVSKELALKMYNEMATLQVMDTIFFEAQRQGRISFYLTSHGEEAINIASAAALTIDDIVLPQYREPGVLLWRGFTLQEFANQCFGNKLDYGKGRQMPIHYGSNRLNYFTVSSPIATQLPHAVGAAYSLKMDKKDACAITYFGDGGTSEGDFHAALNFAAVMEAPVIFFCRNNGWAISTPTSEQFRSDGAVIRGQAYGMRSIRVDGNDALAVYSAVHTAREMAIKEGRPILVEALTYRVGHHSTSDDSTKYRPVDEIEHWRTARDPISRYRKWVQGNGWWCDEDESELRNNVRQELLKAIQVAERMPKPPLAELFTDVYDEVPSNLREQERLLRDTIKKHPADYPADVHI

SEQ ID NO: 50821 - protein, 729 aa, Zea mays
MPAWWPRSKLRSRSKAKPGAGSVSAASSPRKSADLESPSPSPSPTPTPTPRDRKAHSLDFPGAAAARGRPAGAAPGHGSVGYKLPTPVEAVEPVGTLYEVVLAAAAAAAAGDGCSSAEESSVCSAASLDEPHYQHGFRPMDPAAFARERNMPSDSDRILNEDKRFMSCSMPREQQKFFDVPAASVRELHLQSDGPSTSEANCSRGRMISGDLFAPRTRSLSPIPKGHAFAVSNGNSREFGFSPRSPVRKMDGLRSPPHPLPLPPASGACSPLHPASGACSPLHPASGACSPLLPTHSFCSPLPSSPSSCPPLPASPTNCSQSQSQWKKGKLLGSGTFGQVYLGFNSENGQFCAIKEVQVIMDDPHSKERLKQLNQEIDMLRQLSHPNIVQYHGSELSDESLSICLEYVSGGSIHKLLREYGSFKEPVIRNYTGQILAGLAYLHGRNTVHRDIKGANILVGPNGEVKLADFGMAKHISSFAEIRSFKGSPYWMAPEVIMNCKGYSLSVDIWSLGCTIIEMATARPPWHQYEGVAAIFKIANSKDIPEIPDSFSEEGKSFLQLCLKRNPASRASAVQLMDHPFVQDHPAVRAAKSSVLRNTPSSPADGRHTMSNRELPSRKIITPLKDIGLGMRDFTGFSTTVPSPHSPIPGRANMSTPVSPCSSPLRQFKQSNVRGMRSPPHPMLSPGLGNTVSYTQNQTRRNPAPAISDPWMDVGQMKLQSPNISPRRF

SEQ ID NO: 50822 - protein, 473 aa, Cunninghamella elegans
MNNFIFKRLNVKEFYEAETKKLVENGHEFHLRLERTGYVIHTCNPQAIKEILLKGDKFPKYDYNTSNNEDGSFFHEFVGFENVLMTNGSTWKKHRMIVNPAFKTALPSRLFGDCTRDLFKLWDNEYANEPFDSDIHNITERLTLQIIGKAAFDFDFNAILDEKSIWKQTYDGINKAASDPLFILFPILEEKFLWLFPKRQQSFKLLNEWKKMLLSIIEKKREAIQNNVDHGVEEAEKDLLTLMIESEHRGEGALSNEELLSDLIIFFIAGHDTTAFALSAAIYYLAKHPDIQEKARQEAISVLCPNGEVDEDIFPTTEDTKHFVYINQIMKETLRINGSVLFLLSPRLVTQDVNLSGVFIPKGSQINVNIHEVHHNPNVWHDPETFDPDRWASNGEAEQLAGKGMAWVPFSNGNRQCIGMNFSLLEQRVILGSLLRKYEWTLPEDSIHQDYMVNKFNLIPKPIDLKIRFKRRY

SEQ ID NO: 50823 - protein, 355 aa, Arabidopsis thaliana
MTKSHVIFSASIALFLLLSISHFPGALSQSNKDCQSKSNYSCIDKNKALDLKLLSIFSILITSLIGVCLPFFARSIPAFQPEKSHFLIVKSFASGIILSTGFMHVLPDSFEMLSSPCLNDNPWHKFPFAGFVAMMSAVFTLMVDSITTSVFTKSGRKDLRADVASVETPDQEIGHVQVHGHVHSHTLPHNLHGENDKELGSYLQLLRYRILAISIVIGLSVGDTNNTCTIKGLVAALCFHQMFEGMGLGGCILQAEYGWVKKAVMAFFFAVTTPFGVVLGMALSKTYKENSPESLITVGLLNASSAGLLIYMALVDLLAADFMGQKMQRSIKLQLKSYAAVLLGAGGMSVMAKWA

SEQ ID NO: 50824 - protein, 131 aa, Geobacter metallireducens GS-15
MIMPLINGLKITLKHMFMKPVTLQYPDERPTPSPNFRGLHALKVSHSKAKCVCCYLCPTVCPAKCITVEAGEDQEHNKYAERYEIDMLRCIFCGYCVEACPVDALKMTGEFELANYKREDFVFVKERLLEK

SEQ ID NO: 50825 - protein, 309 aa, Vibrio parahaemolyticus RIMD 2210633
MNPISRVAIIGECMVELKKHDGVLQQGFGGDTLNTAVYLSRLTKQHGVETSYVTGLGHDPFSREMLTAWREEGINTDMVYLSEDKLPGIYAIETAEDGERSFFYWRNDAAAKYWLRERALLSLVKDLCQHQMIYLSGISLAIISDDCRQMLIELLTMCRKEGVKIAFDNNFRPKLWPNIEQARDFYSKILSVTDMAFLTFDDEVMLWGDKHEDEAISRTKNFGVKEIIVKRGADDCFVVTQDQQHTVAALKVDAVVDTTAAGDSFSAGYLAKRILGGDVAESALAGHKVAGTVIQHRGAIIPSQAMPTI

SEQ ID NO: 50826 - protein, 268 aa, Streptomyces avermitilis MA-4680
MRASLLQIRVDEGESVDSRRRRVTSLVREQAGVDLVVLPELWTTGAFAYESFDAEAESLEGPTSDAMANAASEAGVWLHAGSIPERAPDGTLYNTSLVFTPGGELAATYRKIHRFGFDKGEAVLMGAGSELVTVRLPETTVGVATCYDLRFPELFRGLVDAGAETLVIPAGWPERRRSHWTLLAQARAVENQAFVLACGTAGTHAGVPQAGHSIVVDPWGEVLAEAGTDEEILTVEFDPAKVAVTREQFPALKDRVLGSTSTARRQAP

SEQ ID NO: 50827 - protein, 397 aa, Chlamydophila abortus S26/3
MSFFHQLPTFAPDSILGLQKLFLEDEREEKVNLVIGSYEDPNKAYGGFSSVRKAQFSLLENEMNKGYLPISGLLSFNQQMESLVFGDDVNPSFVVGAQALGGTGALHLGAKIFAMAHPSAAVYIPEQTWGNHLRIFAQQGLDVLKYPYYSSESKTLVFDEMISVLKSAPKNSLVLLQCCCHNPTGMDLDENMWTRLAELMKERQLLPFFDTAYLGFGLGIEEDRKPIKIFIDSGHTVFVAACASKNFSLYGERVGYFAAYSRVVDDLDKISSCLEEKIRGEYSSPPRHGAKIVSTILSDASLKTEWLAELDTIRCSLQKTRTRFVQAMRNHIGHSFDFILSQKGFFGYPGFSLEQVLFLRLEKGIYTTSGARFNLNGITDNNIDHVVQSFAEAYQQA

SEQ ID NO: 50828 - protein, 357 aa, Colletotrichum lagenarium
MAEFIRAQIFGTTFEITSRYSDLQPVGMGAFGLVCSARDQLTNQNVAVKKIMKPFSTPVLAKRTYRELKLLKHLRHENVISLSDIFISPLEDIYFVTELLGTDLHRLLTSRPLEKQFIQYFLYQIMRGLKYVHSAGVVHRDLKPSNILVNENCDLKICDFGLARIQDPQMTGYVSTRYYRAPEIMLTWQKYDVEVDIWSAGCIFAEMLEGKPLFPGKDHVNQFSIITELLGTPPDDVINTIASENTLRFVKSLPKRERQPLKNKFKNADPSAIDLLERMLVFDPKKRITATEALSHDYLAPYHDPTDEPVAEEKFDWSFNDADLPVDTWKIMMYSEILDYHNVDASAQQIEEQFNGQ

SEQ ID NO: 50829 - protein, 332 aa, Triticum aestivum
MAEASPRTETSTDDTDENLMLEPGNAALAVVSDSSDRSRDKNGDQKTMRRLAQNREAARKSRLRKKAYVQQLENSRLKLTQLEQELQRARQQGIFISSSADQSHSMSGNGALAFDTEYARWLEEHNRQVNELRAAVNAHAGDTELRSVVEKIMSHYDEIFKQKGNAAKADVFHVLSGMWKTPAERCFLWLGGFRPSELLKLLSTQLEPLTEQQLSGICNLQQSSQQAEDALSQGMEALQQSLAETLAGSIGSSGSGSTGNVANYMGQMAMAMGKLGTLENFLSQADNLRQQTLQQMQRILTTRQSARALLVISDYSSRLRALSSLWLARPKE

SEQ ID NO: 50830 - protein, 350 aa, Bacillus cereus ATCC 14579
MKALLWHNQRDVRVEEVPEPTVKPGTVKIKVKWCGICGTDLHEYLAGPIFIPTEEHPLTHVKAPVILGHEFSGEVIEIGEGVTSHKVGDRVVVEPIYSCGKCEACKHGHYNVCEQLVFHGLGGEGGGFSEYTVVPEDMVHHIPDEMTYEQGALVEPAAVAVHAVRQSKLKEGEAVAVFGCGPIGLLVIQAAKAAGATPVIAVELSKERQELAKLAGADYVLNPATQDVLAEIRNLTNGLGVNVSFEVTGVEVVLRQAIESTSFEGQTVIVSVWEKDATITPNNLVLKEKEVIGILGYRHIFPAVIKLISSGQIQAEKLITKKITVDQVVEEGFEALVKDKTQVKILVSPK

SEQ ID NO: 50831 - protein, 431 aa, Arabidopsis thaliana
MLLKIKRVPTVVSNYQKDETVEEGGCGRNCLSKCCINGARLPLYTCKNLDKSVGENTESPVTFLESLVIGEWEDRFQRGLFRYDVTACETKVIPGKYGFIAQLNEGRHLKKRPTEFRVDKVLQPFDGNKFNFTKVGQEELLFQFKASTNDDDSEIQFLASMPLDADNSPSVVAINVSPIEYGHVLLIPRVLDCLPQRIDHKSLLLALQMAAEADNPYFRLGYNSLGAFATINHLHFQAYYLAMQFPIEKASSLKITTTNNGVKISKLLNYPVRGLLVEGGNTIKDLADTVSDASVCLQNNNIPFNILISDSGKRIFLLPQCYAEKQALGEVSSTLLDTQVNPAVWEMSGHMVLKRKEDYEGASEEKAWRLLAEVSLSEERFREVNTMIFDAIGFSSHEEEEEEELEEQNSMNGGSFTIVHCPSVKEEAVSN

SEQ ID NO: 50832 - protein, 242 aa, Shigella boydii
LKKRKEGAFVPFVTLGDPGVELSLKIIDALIEAGADALELGIPFSDPLADGPTIQNATLRAFAAGVTPAQCFEMLTLIRQKHPAIPIGLLMYANLVFNKGIDEFYAQCEKVGIDSVLVADVPVEESAPFRQAALRHNVAPIFICPPNADDDLLRQIASYGRGYTYLLSRAGVTGAENRAALPLNHLVTKLKEYNAAPPLQGFGISTPEQVKAAIDAGTAGAISGSAIVKIIEHNMNQPEKML

SEQ ID NO: 50833 - protein, 230 aa, Lactobacillus johnsonii NCC 533
MSKLVLIRHGQSEWNLSNQFTGWVDVNLSEKGVEEAKKAGRLIKEHGLEFDQAYTSLLTRAIKTLHYALEESDQLWIPETKTWRLNERHYGALQGLNKKDTAEKYGDEQVHIWRRSYDVLPPAIDDDNEYSQAHDRRYANLDPHIVPKAENLHVTLDRVMPFWEDHIAPDLLDGKNVIIAAHGNSLRALTKYIENISDDDIMDLEMKTGEPVVYTFDDKLDVVNKEKLDD

SEQ ID NO: 50834 - protein, 554 aa, Salmonella enterica subsp. enterica serovar Typhi Ty2
MCSIFGVFDIKTDAAELRKKALELSRLMRHRGPDWSGIYACDNAILAHERLSIVDVNAGAQPLYNAKKTHVLAVNGEIYNHQTLRAEYGDRYAFQTGSDCEVILALYQEKGPDFLDDLQGMFAFALYDSEKDAYLIGRDHIGIIPLYMGYDEFGNFYVASEMKALTPVCRTIKEFPAGSYLWSKDGEIRQYYQRDWFDYDAVKDNVTDKNALRQALEESVKSHLMSDVPYGVLLSGGLDSSVISAITKKFAARRVEDQERSEAWWPQLHSFAVGLEGSPDLKAAQEVANHLGTVHHEIHFTVQEGLDAIRDVIYHIETYDVTTIRASTPMYLMSRKIKAMGIKMVLSGEGSDEVFGGYLYFHKAPNAKELHEETVRKLQALHMYDCTRANKAMSAWGVEARVPFLDKKFLDVAMRINPQDKMCGNGKMEKHVLRECFESYLPASVAWRQKEQFSDGVGYSWIDTLKEVAAKQISDQQLETARFRFPYNTPSSKEAYLYREIFEELFPVPSAAECVPGGPSVACSSAKAIEWDEAFKTMDDPSGRAVGVHQSAYQ

SEQ ID NO: 50835 - protein, 320 aa, Glycine max
MGAVVECYPQPRTAVLSLNTLPLGFRFRPTDEELIDYYLRSKINGNGDDVWVIREIDVCKWEPWDLPDLSVVRNKDPEWFFFCPQDRKYPNGHRLNRATSHGYWKATGKDRRIKSGSTLIGMKKTLVFYTGRAPKGKRTNWVMHEYRPTLKELDGTNPGQNPYVLCRLFKKQDESLEASNGDDVDRTASTPMTANYSPDEIQSDSALVPASSSQVTEDDKPLPVISENSEEAISNIITPGEIHSDGCNAPDAQDQIVEPVAEEDQPLNVDIFYDPTNLPLDDKLFSPVHAHFPTDFYYQANNQSELQYGTNENISEFPPL

SEQ ID NO: 50836 - protein, 537 aa, Zea mays
  misc_feature (11)..(11): Xaa can be any naturally occurring amino acid
  misc_feature (195)..(195): Xaa can be any naturally occurring amino acid
  unsure (1)..(537): unsure at all Xaa locations
MALAFDEFGRXPFIILREQEKKTRLRGLDAQKANIASAKAVARILRTSLGPKGMDKMLQSPDGDVIITNDGATILEQMDVDNQIAKLMVELSRSQDYEIGDGTTGVVVMAGALLEQAEKLLERGIHPIRVAEGYEMASKVAFDHLEHISEKFEFSADNIEPLVQTCMTTLSSKIVNRCKRALAEIAVKAVLAVAXDLERKDVNLDLIKVEGKVGGKLEDTELVYGIIVDKDMSHPQMPKRIEDAKIAILTCPFEPPKPKTKHKVDIDTVEKFQTLREQEQKYFDEMVQKCKDAGATLVICQWGFDDEANHLLMHRNLPAVRWVGGVELELIAIATGGRIVPRFQELSPEKLGKAGLVREKSFGTTKDRMLYIEKCANSRAVTIFIRGGNKMMIEETKRSLHDALCVARNLIRNNSIVYGGGSAEISCSIAVETAADRHPGVEQYAIRSFADALDAVPLALAENSGLSPIDTLTAVKAQQVKESNPHCGIDCNDVGTTDMKEQNVFETLIGKQQQILLATQVVKMILKIDDVISPSEY

SEQ ID NO: 50837 - protein, 762 aa, Bacillus cereus G9241
MAIQTSNLGYPRIGLQREWKKTLEAFWSKKIDEEQFLTTMKEIRLQHVKVQQEKGIELIPVGDFTYYDHVLDTAYMLGFIPSRFSEFTSYLDVYFAMARGSKDHVASEMTKWFNTNYHYIVPEYEEGLQISLKDNRPLRLYEEAKQELGVDGKPVILGPYTFLKLAKGYKKEQFTTILKQLVAPYVQLLSELHAAGAQVIQVDEPIFASLTNEEIQQAKDIYEAIRKEVPNVNLLLQTYFDSVEENYEEIITFPVSGIGLDFIHGKEGNLHAISKYGFPADKTLAVGCIDGRNIWRADLDEVLTLFTTLQKQVQTKDFIVQPSCSLLHTPIDKTEETHLSTELFDALAFANQKLEELVLIHSALTQGTESIRNELETYRNVHHTIRSSAARNREDVKAARTALKEEDFSRPLPFEKRYELQQVALKLPLLPTTTIGSFPQTTEVRQTRKEWRNGVISNEQYEQFIEKETEKWIRYQEEIGLDVLVHGEFERTDMVEYFGERLAGFSFTKNGWVQSYGSRCVKPPVIYGDVAFINGMTIKETVYAQSLTEKVVKGMLTGPVTILNWSFVRNDIPRKEVSYQIALALRHEIERLESSGIRVIQVDEPALREGMPLKEKDWDTYITWAVQSFLLATSSVANETQIHTHMCYSNFEDIVDAIRALDADVISIETSRSHGEFIDTLKHTTYEKGIGLGVYDIHSPRVPSKDEMYKIVEQSLQVCDPKYFWINPDCGLKTRRTEEVIPALEHMVQAAKDARSLLKTNA

SEQ ID NO: 50838 - protein, 174 aa, Geobacillus kaustophilus HTA426
MEKATFAGGCFWCMVMPFEELDGIYGIVSGYTGGHVENPTYEQVKTGTTGHYEAVQITFDPDVFPYERLLELYWCQIDPTDDGGQFHDRGPQYRTAIFYHNEKQRQLAEQSKRALEESGRFSKPIVTKILPATTFYPAEEYHQNYHKKNPEHYKQDRAASGRDEFIAKHWGTKR

SEQ ID NO: 50839 - protein, 469 aa, Bacillus thuringiensis serovar konkukian str. 97-27
MKPPTDNNKEGAESHKLESESKPIWKSMSMFLVPLLLSNVLQSVGQLFGMVVVGRWLGVNDLAAISAFFPLFFLLVSFVIGIGSGSSILIGQAFGAKNEDRLKAIVGTTLTFTFIIGVVLAIVGSIFAMDIMRLMGTPENIIEISVHYARILFISMPVLFLYFAYTTFMRGTGDSKTPFYFLIVSTALNMILLPILIFGWLGAPKLDVYGAAYASVISTVITFIVMLVYLKKKNHPLQLDSTVRKYLRMDWDLLKLLLRLGIPASINMILVSLSEIAVIAFVNRYGSDATAAYGVVNQVASYVQMPAVSLGITVSIFAAQSIGANQFDRLQKVVKAGIIMNYVIGGVLISLIYLFSRDILSLFLTSQTTIEIAHSLVMITLWSYLIFGHAQIISATMRASGTVLWPTVIGVVSIWLVEVPVAYYLSYHTSLGIEGIWIGYPAAFIVSLILQYAYYKLSWQKKRITRLVS

SEQ ID NO: 50840 - protein, 427 aa, Geobacter metallireducens GS-15
MNTSHSKELFAKAQEIIPGGVNSPVRAFKSVGAEPVFIKKASGSTIIDADDNAYIDYVGSWGPMILGHCHPRIVASVQRATENGSSFGAPTELEITLAEMVVAAVPSIEMVRMVSSGTEATMSAIRLARGYTGRDKIIKFSGCYHGHADSLLVKAGSGAATFGVPDSPGVPRDFAQHTLTATFNDLESVEELICAHSREVACIIVEPIAGNMGTVPPRAGFLEGLREICTNEGIILIFDEVMTGFRVAYGGAQERYGITPDMTTLGKIIGGGLPVGAFGGKREIMQQLSPSGGVYQAGTLSGNPLAMTAGIETLKLLQEDGFYGRLEEKSRALAEGIADAARRAGYPIYSTRVGSMFCAFFTNGEVHDWTSAAMCDTKSFATFFRSMLEEGIYLAPSQFETAFVSIAHSSEDIEKTIAAAFSCFKKL

SEQ ID NO: 50841 - protein, 222 aa, Nicotiana tabacum
MASGYGDASQKIDYVFKVVLIGDSAVGKTQILARFARNEFSLDSKATIGVEFQTRTLVIQHKSVKAQIWDTAGQERYRAVTSAYYRGAVGAMLVYDITKRQTFDHIPRWLEELRAHADRNIVIMLTGNKTDLEDQRAVPTEDAKEFAQKEGLFFLETSAMEATKLEDAFLTVLTEIFNIVNKKNLAADENQSNSNPASLTGKKILVPGPGQVIPGKKACCSS

SEQ ID NO: 50842 - protein, 222 aa, Nicotiana tabacum
MASGYGDASQKIDYVFKVVLIGDSAVGKSQILARFARNEFSLDSKATIGVEFQTRTLAIQHKSVKAQIWDTAGQERYRAVTSAYYRGAVGAMLVYDITKRQTFDHIPRWLEELRAHADRNIVIMLIGNKTDLEDQRAVPTEDAKEFAQKEGLFFLETSAMEATNLEDAFLTVLTEIFNIVNKKNLAADDNQSNGNPASLTGKKILVPGPGQVIPEKKACCSS

SEQ ID NO: 50843 - protein, 391 aa, ASPERGILLUS NIDULANS FGSC A4
MSSTLEIATDNENMPLMKALQFHGPRDVRVEQIEEPVCGKGQVKLRNTYCGICGSDLHEYTSGPVLIPKGAHSITKATAPVVMGHEFGGVVEEVGEGITHLKPGQKAVVRPTIFDRKCPPCKIGYEYCCENIGFIGLSGMLFFRIKQAVRSGQANVPMRTGYGGGFAEKIVAPAEHFYPIPDNVTPESMAMIEPLAVAWHAVNLSPFKEGDNVLVVGGGPLGLCILQVLKMRGANFTIIAELTETRKKSAKYFGATHILDPREVDIPDNVRGLTDGVGADVVFDTAGVEKALDGAIGACRVHGTIVNVAVWEKKPQIKVNEMMYHEVKYLGSALYDEKSFQDTIDAISKGLLKPESMITDKIKLEDVVEKGFKTLLQDRNTHCKILVDPQI

SEQ ID NO: 50844 - protein, 469 aa, Bacillus anthracis str. 'Ames Ancestor'
MKSSIDSIQESKRLKNQQKEEKATWKAMSMFLVPLLLSNILQSVGQLFGMVVVGRWLGVNELAAISAFFPLFFLLVSFVIGIGSGSSILIGQAFGAHNEERLKAIVGTTLTFTFIIGVILAIVGNVFALNIMRLMGTPENIIDMSVHYARILFISMPVLFLYFSYTTFIRGTGDSKTPFYFLIVSTVLNIMLLPILIFGWVGIPKIGVYGAAYASVISTIITFIVMIIYLKKKNHPLQLDETVRKYLRMDWGLLKLLLRLGIPASINMILVSLSEIAVIAFVNRFGSDATAAYVVVNQVASYVQMPAVSLGITVSIFAAQSIGAKQFNRLQEVIRAGIVMNYIIGGILIAFIYLFSREILSLFLTSSNTIEIAHSLVMITLWSYLIFGHAQIIGATMRASGTVLWPTIIGVVSIWLVEVPVAYYLSYHTNLGIKGIWIGYPAAFIVSLLLQYGYYKLSWKKKRISRLVS

SEQ ID NO: 50845 - protein, 381 aa, Arabidopsis thaliana
MSNHLQDPLTTYPKPGLTKEEQEIDEKMVSLQAESIVNAVAFPMVLKAALELGVIDTIAAASNGTWLSPSEIAVSLPNKPTNPEAPVLLDRMLRLLVSHSILKCCMVESRENGQTGKIERVYAAEPICKYFLKDSDGSGSLSSLLLLLHSQVILKTWTNLKDVILEGKDAFSSAHDMRLFEYISSDDQFSKLFHRAMSESSTMVMKKVLEEYRGFEDVNTLVDVGGGIGTILGLITSKYPHIKGVNFDLAQVLTQAPFYPGVKHVSGDMFIEVPKGDAIFMKWILHDWGDEDCIKILKNCWKSLPEKGKVIIVEMITPMEPKPNDFSCNTVLGMDLLMLTQCSGGKERSLSQFENLAFASGFLLCEIICLSYSYSVIEFHK

SEQ ID NO: 50846 - protein, 283 aa, Pseudomonas fluorescens PfO-1
MTTALQQPSLSSQCLAEFLGTALLIFFGTGCVAALKVAGASFGLWEISIIWGVGVSMAIYLTAGVSGAHLNPAVSIALSIFADFEKRKLPFYILAQVAGAFCGALLVYTLYSNLFFDYEQTHHMVRGTEASLELASVFSTFPNPALSTAQAFLVEVIITAILMGVIMSLTDDNNGLPKGPLAPLLIGLLIAVIGSSMGPLTGFAMNPARDFGPKLMTFFAGWGEISFTGAREIPYFLIPIFAPIVGACLGAAGYRGLIARHLTGATPATKDAEPAIDGKPRTS

SEQ ID NO: 50847 - protein, 118 aa, Glycine max
SNKENAADVKAKFVIEAANHPTDPDADEILSKKGVIILPDIYANAGGVTVSYFEWVQNIQGFMWEEEKVNRELKKYMTKAFQDIKAMCKIHNCDLRMGAFTLGVNRVARATLLRGWEA

SEQ ID NO: 50848 - protein, 668 aa, Synechococcus elongatus PCC 6301
MVVAAQSLDELCINSIRFLAIDAVEKAKSGHPGLPMGAAPMAYVLWDRFLRFNPKNPAWFNRDRFVLSAGHGCMLQYALLHLSGYDSVSIEDIKNFRQWGSPTPGHPENFETPGVEVTTGPLGQGIANAVGLALAEAHLAARFNKPDAKLVDHYTYVILGDGCNMEGISGEAASLAGHWGLGKLIALYDDNHISIDGSTDVAFTEDVSKRFEAYGWHVLHVENGNTDLAAIEKAIADAKAVTDKPTLIKVTTTIGYGSPNKANTAGVHGAALGDAEIKLTRENLGWDYEPFVVPEDALAHWRKAIERGAALESSWNETLAQYKANYPAEAAEFERMLSGQLPTGWADALPSYTPADKAVATRKHSEICLNALAPVLPELIGGSADLTHSNLTELHVSGDFQKGAYENRNVHFGVREHAMAAIANGIALHNSGLIPYAATFLVFADYMRGAMRLSALSEVGVIYVLTHDSIGLGEDGPTHQPVETIASLRIIPNMLVFRPADGNEASGAYKVAVENRKRPSVLAMSRQNLPNLEGSSIDIVAKGAYVLSDDEGTPDLILLATGSEVSLCVEAAKQLRAEGKKVRIVSMPCWELFDEQSAEYKESVLPKAVTARLAVEAGSSFGWHRYVGDAGATISTDTFGASAPGNVMFEKFGFTVDNVVAKAKAVIG

SEQ ID NO: 50849 - protein, 306 aa, Zea mays
MASLQVTPTSAFSEWNELKFEGLYLFHTPLGSGANQAQVIDNKTPIGIGATVVNNWAVYDGPGPNAKLVARAQGLHIQAGNWVNSFSLVFVDQRFSGSTLEVTGIVVESGEWAIVGGTGQFVMANGVISKKFHEQRSEGNIIQLTIHAFCPVLGPTKRLATKVGPWGGSGGSPVDITAEPQRLKSITVATGIAVTSIAFSYVDSAGQTQSAGRWGGSGGETEPVIQLGDSEVLTELSGTIGNVDGHTVITSIKFVTSLKTYGPFGAWGDGSDTPFAVPVQQGSAIVGFFARAGIYLDAVGVYVRSL

SEQ ID NO: 50850 - protein, 433 aa, Pseudomonas aeruginosa UCBPP-PA14
MLIAFVFCFLGLLADGVDLMFLAYSLNSLKAEFGLSNFEAGSLGSLTLAGMAVGGIYGGWCCDRFGRVRVVTWTIVLFSIGTALLGLTQNYWQFALIRFVASLGLGSLFVACNILMSECVGTRYRTTILAAMQAGWTVGYLVATLLAGQIIPEFGWRTLFFTAVAPALVCLALRPWVPESPSWLAAQAGRQRPGAAPQSHAEAGGAGPLGRMLGDPETRGMFLLWSLTSCFLLFGYYGTNNWMPSYLESELGMNFKSMTGYMVGTYSAMILGKVAAGVCADLFGRRLTFAAGAIGSAAFMPLIVFYHSPSNILWILITFGFIYGVPVGVLATYMTESFSTRVRGSAVGTAYNLGRIGAAVAPAGIGLLATHVSIGAGFLVMGITYVLTGLIPALFIADRLYDPNRESRDAESASRRQAPGSAVDTAERRAAKA

SEQ ID NO: 50851 - protein, 417 aa, Synechococcus elongatus PCC 6301
MTETGRQRVVITGLGAITPIGNDPTEYWQGLLAGRNGIDLIRGFDASRHACKIAGEVKDFDPTQYMDRKDAKRMDRFAQLAVAASRQAVADAKLDITELNADAIGVLIGSGIGGLRVMEDQQTVLLEKGPDRCSPFMVPMMIANMAAGLTAIQLGAKGPCNVTVTACAAGSNAVGEAFRLIQHGYAQAMICGGTESCVTPLAMAGFAACKALSLRNDDPAHACRPFDQGRDGFVMGEGAGILVLESLEHAQARGAHIYGEIVGYGMTCDAYHITSPVPGGLGAARAIELALRDANLQPSQVSYINAHGTSTPANDSTETAAIKKALGEHAYKTVISSTKSMTGHLLGGSGGIEAVAATLAIAEDMVPPTINLEDPDPDCDLDYVPNQARSLPVEVALSNSFGFGGHNVTLAFRKFHP

SEQ ID NO: 50852 - protein, 476 aa, Pseudomonas syringae pv. tomato str. DC3000
MYPDVQLYIDGQWRASRDGRSIPVIDPATGQSLGSVAHAGIADLDEALSAAERGFATWRATSAYDRYKLMQKAADLVRERADSIARIMTQEQGKPLAEARMETLSAADVIDWLAEEGRRSYGRIVPSRGVSIEQKVIKEPVGPVAAFTPWNFPINQVVRKLSSALAAGCSIIVKAPEETPGSPAELIRAFADAGVPAGVIGLVYGDPAEISGYLIPHPVIRKVTFTGSTPVGKQLAALAGKHMKRATMELGGHAPALVFDDADIDLAARVLATAKFRNAGQVCVSPTRILVQRKVLQAFTEKFVGLTREIKVGNGLESGTTMGPVANDRRIPALVDLIEDAVSAGATVSAGGKAVEGQGYFFEPTVLSGLTPAMRIMNEEPFGPVALLVPFDTVEEAIVESNRVPFGLASYAFTTSMKTAQALSTYIEAGMLSINHQGIGLPEVPFGGIKDSGYGSEGGTEAIEAYLNTKLVTQYS

SEQ ID NO: 50853 - protein, 149 aa, Lactobacillus johnsonii NCC 533
MEGSFIMANEMMKNRNNDNMMDQLSDWFSFPKDFFDDSSIKNIMQSDVAETDKDYIVKVDMPGMDKKDIKVSYKDGVLNVSGSRDSFDNLDNNNGNVLHRERSVGHIQRSYRIPDVDSKEISAKDVNGVLTITLPKLTEEDKENTINIE

SEQ ID NO: 50854 - protein, 345 aa, Desulfitobacterium hafniense DCB-2
MDKKMRFAIIGCGRIAPKHAESIVALEEAELVAVCDIIPERAQAFADKYGAKPYTSYEEMLAKEEIDVVTIATESDLHAPIGITCAKAGKHVMVEKPMAMTLASADELIRTCHEEGVKLSVIHQNRYNKSIKLMRQALEEGRFGKLTHGQATVRWNRNDAYYAQAPWRGTKLQDGGVLMNQSIHNIDLLQWTLGPVESVFGYTRTALRKIEMEDVGVAVIKFKNGALGVIEAASTIYPKNIEETLNIFGETGSVMVGGIAVNRIETWEFPDSEEEKKQIFDSQENDPPNVYGFGHREVMKDMIDAIREDRTPAIPGEEGRKAMEIILAIYKCQETKEPVVFPLSE

SEQ ID NO: 50855 - protein, 1021 aa, Daucus carota
MGVLRVYVILILVGFCVQIVVVNSQNLTCNSNDLKALEGFMRGLESSIDGWKWNESSSFSSNCCDWVGISCKSSVSLGLDDVNESGRVVELELGRRKLSGKLSESVAKLDQLKVLNLTHNSLSGSIAASLLNLSNLEVLDLSSNDFSGLFPSLINLPSLRVLNVYENSFHGLIPASLCNNLPRIREIDLAMNYFDGSIPVGIGNCSSVEYLGLASNNLSGSIPQELFQLSNLSVLALQNNRLSGALSSKLGKLSNLGRLDISSNKFSGKIPDVFLELNKLWYFSAQSNLFNGEMPRSLSNSRSISLLSLRNNTLSGQIYLNCSAMTNLTSLDLASNSFSGSIPSNLPNCLRLKTINFAKIKFIAQIPESFKNFQSLTSLSFSNSSIQNISSALEILQHCQNLKTLVLTLNFQKEELPSVPSLQFKNLKVLIIASCQLRGTVPQWLSNSPSLQLLDLSWNQLSGTIPPWLGSLNSLFYLDLSNNTFIGEIPHSLTSLQSLVSKENAVEEPSPDFPFFKKKNTNAGGLQYNQPSSFPPMIDLSYNSLNGSIWPEFGDLRQLHVLNLKNNNLSGNIPANLSGMTSLEVLDLSHNNLSGNIPPSLVKLSFLSTFSVAYNKLSGPIPTGVQFQTFPNSSFEGNQGLCGEHASPCHITDQSPHGSAVKSKKNIRKIVAVAVGTGLGTVFLLTVTLLIILRTTSRGEVDPEKKADADEIELGSRSVVLFHNKDSNNELSLDDILKSTSSFNQANIIGCGGFGLVYKATLPDGTKVAIKRLSGDTGQMDREFQAEVETLSRAQHPNLVHLLGYCNYKNDKLLIYSYMDNGSLDYWLHEKVDGPPSLDWKTRLRIARGAAEGLAYLHQSCEPHILHRDIKSSNILLSDTFVAHLADFGLARLILPYDTHVTTDLVGTLGYIPPEYGQASVATYKGDVYSFGVVLLELLTGRRPMDVCKPRGSRDLISWVLQMKTEKRESEIFDPFIYDKDHAEEMLLVLEIACRCLGENPKTRPTTQQLVSWLENIDVSS

SEQ ID NO: 50856 - protein, 728 aa, Malus x domestica
MPALACCVDAAVAPPGHAFAGDSSLPASPFPGLPPATITTAADNSHWSPSLSSDLYRIDAWGGPYFTVNSSGNVAVRPHGTATLPHQEIDLLKIVKKVSDSKPECGLGLQLPLIVRLPDVLKDRLESLQGAFDLAIRSHDYGSHYQGVYPVKCNQDRFVVEDIVKFGSPFRFGLEAGSKPELLLAMSCLCKGHPDALLICNGFKDLEYISLALFARKLALNTVIVLEQEEELDLVVDFSQKLGVRPVIGVRAKLKTKHSGHFGSTSGEEGKFGLTTTQILRVVKKLDKLGMLDCFQLLHFHTGSQIPSTALLADGVSEASQIYCELVRLGAHMKVIDIGGGLGIDYDGSKSSDSEISVSYGLEEYASAVVRTVRNVCERRSVKHPVICSESGRALVSHHSVLIFEAISSSACDDAPPMSAFEHQYFIEGLTDEARADYLNLSAAAIRGEYEACLTYADLLKQRSVEQFKEGSVGIEQLATVDGFCDMFSKAIGASDAVRTYHVNLSVFTSIPDFWGIGQTFPIVPIHRLDQWPAVRGVLSDLTCDSDGKIDKFIGGGSSLPLHELEGDGGNNGGGQKYYLGMFLGGAYQEALGGVHNLFGGPSIVRVSQSDGPHSFAVTGAVSGPSCGDVLRVMQHEPELMFETLKHRAEECGQGDDGGMASAAVATSLARSFHNMPYLVSASSCSLTAMNNHGFYYCSEDDYGDIVADSAGAAAPVGEEEQWSYCCA

SEQ ID NO: 50857 - protein, 586 aa, Bacillus cereus G9241
MLKEAIYHRPKDNYAYAYDEKTIHIRIRTKRDDVQSTTLIYGDPYEWTDGKWISSSTPMKKTGSTALFDYWSISIEPKFKRLRYGFELKAGTETLIYAERGFFPSIPNDDVGNFFCFPFIHANDVFKAPSWIKDTVWYQIFPERFANGDRTLNPENTLPWGSAEPTPTNFFGGDFAGIMQNLDYLVKLGISGIYFTPIFKAHSNHKYDTIDYMEIDPQFGTKETFKELVEACHTHGIKVMLDAVFNHSGYFFDKFQDVLENGEQSAYKDWFHIHEFPIRTEPLPNYDTFAFTPYMPKLNTAHPDVKEYLLEVGRYWVKEFNIDGWRLDVANEVDHKFWREFRSEIKALNSEVYILGEIWHDALPWLQGDQFDAVMSYPVTNALLSYFANDSIKANEFMKQIIESLHSYSMNVNEAAFHLLDSHDTPRILTTCNGDKNKLKLLYVFHLSFIGSPCIYYGDEVGMDGGMDPDCRKCMVWDTKEQDHLLFTHVRTLISLRKQYKAFGGHGTFQFIEANDEHNYISYTKTYEDETIFFVLNPTNSAITTSLPLHVTGKKIINIYTNEEFSAEASALQVTLPPYGFSILKW

SEQ ID NO: 50858 - protein, 502 aa, Agrobacterium tumefaciens
MKENQLVLVRRHILEIEMQNKVQFITYVDRLTRGGFRQLKELVDGKFAGLFGGVHVLPFFNPIDGADAGFDPTDHTIVDPRLGDWEDVRALSGSVEIMADLIVNHVSSQSGAFTDFIAKGSASEFADMFMTFEKVFPDGATEEDLLRIYRPRPGLPFSKVTLADGTQRMLWTTFTPEQIDIDVHSAKGTTYLETILDRFSEANVTAIRLDAAGYAIKKAGSSCFMIDDTYAFLEEVAGKARNRGMEVLVEIHSYHRDQIEIAKKVDRVYDFALPPLILHALFTGDATPLAKWLAISPRNAITVLDTHDGIGVIDVGARSDGRAGLLEPQAIDNLVEEIHRRSDGQSRQATGAAASNLDLYQVNCTYYDALGRNDNDYLIARAIQFFAPGIPQVYYVGLLGGVNDMDLLAKTGVGRDINRHYYGNDEIGTALETPLFHRLSNLIRFRNTHPAFGGALKATIADAGALVLSWQHGDAFAELKISFADRKASIAASGQSEMQIVE

SEQ ID NO: 50859 - protein, 431 aa, Triticum aestivum
MAGTVPKLAAPRPAAAGPLPSQPLRAAALAFAPSARRFRVSLAGRARSPVIAMASAKEGNGAVTKRTTLHDLYEQQGQSPWYDNLCRPVTDLLPYIANGVRGVTSNPTIFQKAISSSNAYDGQFKELISAGKDAESAYWELVIKDIQDACKLFEPIYDETDGADGYVSVEVSPRLANDTQGTVEAAKWLHKVVNRPNVYIKIPATAECVPSIKEVIANGISVNVTLIFSVARYEAVIDAYLDGLEASGLSDLSRVTSVASFFVSRVDSLIDKMLEKIGTPEALALRGKAAVAQAKIANQLYLKKFSGPRWEALVKKGAKKQRLLWASTSVKNPAYLDTLYVDPLIGPDTVSTMPDQALDAFIDHGTVARTIDANVSEAEGIYSALEKLGIDWEEVGKQLEHEGVSSFKGSFDSLLTSLEEKGNALKTAANL

SEQ ID NO: 50860 - protein, 558 aa, Bacillus cereus G9241
MEKQWWKESVVYQIYPRSFMDSNGDGIGDLCGIISKLDYLKELGIDVIWLSPVYESPNDDNGYDISDYCKIMNEFGTMEDWDELLHEMHERNMKLMMDLVVNHTSDEHNWFIESRKSKDNKYRDYYIWRPGKEGKEPNNWGAAFSGSAWQYDEMTDEYYLHLFSKKQPDLNWDNEKVRQDVYEMMKFWLEKGIDGFRMDVINFISKEEGLPAVETEEEGYVSGHKHFMNGPNIHKYLHEMNEEVLSHYDIMTVGEMPGVTTEEAKLYTGEERKELQMVFQFEHMDLDSGEGGKWDVKPCSLLTLKENLTKWQKELEHTGWNSLYWNNHDQPRVVSRFGNDGIYRIESAKMLATVLHMMKGTPYIYQGEEIGMTNVRFESIDEYRDIETLNMYKEKVIERGENIDKVMQSIYIKGRDNARTPMQWDDKDHAGFTTGEPWITVNPNYKEINVKQAIQNKDSIFYYYKKLIELRKNNEIIVYGSYDLILENNPSIFAYVRTYGEEKLLVIANFTAEECVFELPEDISYSEAELFIHNYDVENGLIDNMTLRPYEAMVFKLK

SEQ ID NO: 50861 - protein, 589 aa, Pseudomonas syringae pv. tomato str. DC3000
MPTRTSRRTFVKGLAASSILSGLGLWRSPAWALPNPGQPDGLSGTEFDLTIGETQVNITGNARTAMTINGGIPGPLLRWREGDTVTLRVKNRLDETTSIHWHGIILPANMDGVPGLSFDGIAPDGMYVYRFKVRQHGTYWYHSHSGFQEQSGVYGPLVIDAKEPEPFTYEREHVVMLTDWADEDPARVMKKLKKQSDYYNNNKRTVGDFINDVGEKGWSATTAERWMWAQMKMNPTDLADVSGATYTYLMNGQAPNMNWTGLFKPGEQIRLRFINGSSMTYFDVRIPGLKMTVVASDGLHIKPVVVDELRIAVAETFDVIVEPADGAYTLFAQSMDRTGFARGTLTSRPGMQAEVPPLDPRPLLSMDDMGMAGMDHGSMNHSAKPAMDGMDHSKMDHDSMPGMDHGTMPMQEAPVMQSHPDSERNNPLVDMQAMSTSAKLNDPGIGLRDNGRKVLTYADLRSTFEDPDGREPSRTIELHLTGHMEKFAWSFDGVKFSDAKPLMLKYGERVRIVLVNDTMMTHPIHLHGMWSDLEDENGQFMVRKHTIDMPPGSRRSYRVTADALGRWAYHCHMLYHMEMGMFREVRVEE

SEQ ID NO: 50862 - protein, 464 aa, Geobacter metallireducens GS-15
MKLSSLRFFKEIVFAACLAVLAVGESPAKVLTPDFVDLAEKLKPTVVNISTTKTLTPQFRMRRQPSPFPDPFQDFFEHFFEEMPRRPQRERSLGSGFIISKQGFIITNNHVIAGADEIKVRLSDGREFKAEVKGSDEKLDLALIKIDAKENLPVAELGDSAQIKVGEWVMAIGNPFGLAQTVTAGIVSATGRVIGSGPYDDFIQTDASINPGNSGGPLFNAEGKVIGINTAIVAGGQGIGFAIPVNMAKDVLPQLEEKGKVTRGWLGVTMQPMSPELAKSFGLEGEKGALITDVVKDGPAANAGLRSGDIILEFDGKKINEMSELPRLVAAEPIGKAVKIKVLREGKPREFTVSVGRLAESGDENNQKTAGDAFGLSARELTKDLAARLGLKESRGVVVTGVKQGSIAELGGFQSGDIILEIGDKAVATVMDYEKLIKEYGKGDVVRFLLRRGDSNYYLALRIE

SEQ ID NO: 50863 - protein, 523 aa, Buchnera aphidicola (Uroleucon ambrosiae)
MAAKDVKFGNEARIKMLRGVNVLADAVKVTLGPKGRNVVLDKSFGAPSITKDGVSVAREIELEDKFENMGAQMVKEVASKANDAAGDGTTTATLLAQSIVNEGLKAVAAGMNPMDLKRGIDKAVISAVEELKNLSVPCSDSKAITQVGTISANADEKVGALIAEAMEKVGNDGVITVEEGTGLQNELEVVKGMQFDRGYLSPYFINKPETGIVELENPYILMADKKISNVREMLPILESVAKSGKPLLIISEDLEGEALATLVVNSMRGIVKVAAVKAPGFGDRRKAMLQDISILTGGSVISEELAMELEKSTLEDLGQAKRVVISKDTTTIIGGIGEKHTIQSRISQIRQEIQEATSDYDKEKLNERLAKLSGGVAVLKVGAATEVEMKEKKARVEDALHATRAAVEEGVVAGGGVALVRVAGKISHLRGQNEDQNVGIRVALRAMEAPLRQIVSNSGEEPSVVTNNVKDGKGNYGYNAASDQYGDMIDFGILDPTKVTRSALQYAASVAGLMITTECMVTD

SEQ ID NO: 50864 - protein, 431 aa, Corynebacterium glutamicum ATCC 13032
MSTTTPTRATKSVGTVLALLWFAIVLDGFDLVVLGATIPSMLEDPAWDLTAGQATQISTIGLVGMTIGALTIGFLTDRLGRRRVMLFSVAVFSVFTLLLAFTTNVQLFSLWRFLAGVGLGGALPTAIAMVTEFRPGTKAGSASTTLMTGYHVGAVATAFLGLFLIDGFGWHSMFIAGAVPGLILLPLLYFFLPESPQYLKISGKLDEAQAVAASYGLSLDDDLDREHEEELGESSSLSSLFKPSFRRNTLAIWGTSFMGLLLVYGLNTWLPQIMRQADYDMGNSLGFLMVLNIGAVIGLYIAGRIADKNSPRKTALVWFVFSAFSLALLAVRMPLIGLYGIVLLTGIFVFSSQVLIYAFVGENHPAKMRATAMGFSAGIGRLGAISGPLLGGLLVSANLAYPWGFFAFAGVGLLGALIFSASKTLRHRENA

SEQ ID NO: 50865 - protein, 374 aa, Methylococcus capsulatus str. Bath
MQSRNELPGSRRVIVKIGSALLTAGGKGLDQPAIGQWVQQIAELRQQGIQVVLVSSGSVAEGMSRLGWKTRPHRLNELQAAASVGQMGLVQTYESLFKRHGLQTAQILLTHDDLSNRERYLNSRSTILTLLELGVIPVINENDTVTTEEIRFGDNDTLGALVANAVEADLLIILTDQAGLFERNPSLDPSAPLVPQAGINDPRLNDMVGDSLSGLGRGGMITKLRAARLAARSGTATVIASGRESGVLPRILDGEELGTLLIPDVSPLIARKRWMAGQLKLKGCFVVDEGAARVLRDAGKSLLPIGVIAVEGEFRRGDLVACTDSAGQEIARGLTNYSAEEARLIMRQPSTRIEEILGYVDEPELIHRDNLVLS

SEQ ID NO: 50866 - protein, 143 aa, Populus tremula
MISPSFISPLFTLAVVLTVTITPLISASGGFCQEKMATLGGVQDSQSSQNSAEIDGLARFAVDEHNKKENAILEFARVVKAKEQVVAGTMHHLTIEAIEAGKKKLYEAKVRVKPWLNFKELHEFKDASDVPVFTSSDLGVKRG

SEQ ID NO: 50867 - protein, 548 aa, Escherichia coli
MAAKDVKFGNDAHVKMLRSVNVLADAVKVTLGPKGRNVVLDKSFGAPTITKDGVSVAREIELEDKFENMGAQMVKEVASKANDAAGDGTTTATVLAQAIITEGLKAVAAGMNPMDLKRGIDKAVTAAVEELKALSVPCSDSKAIAQVGTISANSDETVGKLIAEAMDKVGKEGVITVEDGTGLQDELDVVEGMQFDRGYLSPYFINKPETGAVELESPFILLADKKISNIREMLPVLEAVAKAGKPLLIIAEDVEGEALATLVVNTMRGIVKVAAVKAPGFGDRRKAMLQDIATLTGGTVISEEIGMELEKATLEDLGQAKRVVINKDTTTIIDGVGEEAAIQGRVAQIRQQIEEATSDYDREKLQERVAKLAGGVAVIKVGAATEVEMKEKKARVEDALHATRAAVEEGVVAGGGVALIRVASKLADLRGQNEDQNVGIKVALRAMEAPLRQIVLNCGEEPSVVANTVKGGDGNYGYNAATEEYGNMIDMGILDPTKVTRSALQYAASVAGLMITTECMVTDLPKNDAADLGAAGGMGGMGGMGGMM

SEQ ID NO: 50868 - protein, 175 aa, Brassica napus
EVDILDDGYRWRKYGQKVVRGNPNPRSYYKCTAPGCPVRKHVERASHDPKAVITTYEGKHNHDVPTSKSGSSNHHEIQPRFRPPDETDTISLNLGVGISSNGPNENQQLVNQTHPNGVGFRFVHAAPVSTYYASMNQYGPRETQSETQNGDISSLNHSSSYPYPHNNIGRIQTGP

SEQ ID NO: 50869 - protein, 143 aa, Populus tremula
MISPSFISPLFTLAVVLTVTITPLISASGGFCQEKMATLGGVHDSQSSQNSAEIDGLARFAVDEHNKKENAILEFARLVKAKDQVFAGTMHHLTIEAIEAGKKKLYEAKVWVNPWLNFKELHEFKDASDVPVFTSSDLGVKRG

SEQ ID NO: 50870 - protein, 548 aa, Escherichia coli
MAAKDVKFGNDARVKMLRGVNVLADAVKVTLGPKGRNVVLDKSFGAPTITKDGVSVAREIELEDKFENMGAQMVKEVASKANDAAGDGTTTATVLAQAIITEGLKAVAAGMNPMDLKRGIDKAVTAAVEELKALSVPCSDSKAIAQVGTISANSDETVGKLIAEAMDKVGKEGVITVEDGTGLQDELDVVEGRQFDRGYLSPYFINKPETGAVELESPFILLADKKISNIREMLPVLEAVAKAGKPLLIIAEDVEGEALATLVVNTMRGIVKVAAVKAPGFGDRRKAMLQDIATLTGGTVISEEIGMELEKATLEDLGQAKRVVINKDTTTIIDGVGEEAAIQGRVAQIRQQIEEATSDYDREKLQERVAKLAGGVAVIKVGAATEVEMKEKKARVEDALHATRAAVEEGVVAGGGVALIRVASKLADLRGQNEDQNVGIKVALRAMEAPLRQIVLNCGEEPSVVANTVKGGDGNYGYNAATEEYGNMIDMGILDPTKVTRSALQYAASVAGLMITTECMVTDLPKNDAADLGAAGGMGGMGGIGGVM

SEQ ID NO: 50871 - protein, 548 aa, Escherichia coli
MAAKDVKFGNDARVKMLRGVNVLADAVKVTLGPKGRNVVLDKSFGAPTITKDGVSVAREIELEDKFENMGAQMVKEVASKANDAAGDGTTTATVLAQAIITEGLKAVAAGMNPMDLKRGIDKAVTAAVEELKALSVPCSDSKAIAQVGTISANSDETVGKLIAEAMDKVGKEGVITVEDGTGLQDELDVVEGMQFDRGYLSPYFINKPETGAVELESPFILLADKKISNIREMLPVLEAVAKAGKPLLIIAEDVEGEALATLVVNTMRGIVKVAAVKAPGFGDRRKAMLQDIATLTGGTVISEEIGMELEKATLEDLGQAKRVVINKDTTTIIDGVGEEAAIQGRVAQIRQQIEEATSDYDREKLQERVAKLAGGVAVIKVGAATEVEMKEKKARVEDALHATRAAVEEGVVAGGGVALIRVASKLADLRGQNEDQNVGTKVALRAMEAPLRQIVLNCGEEPSVVANTVKGGDGNYGYNAATEEYGNMIDMGILDPTKVTRSALQYAASVAGLMITTECMVTDLPKNDAADLGAAGGMGGMGGMGGMM

SEQ ID NO: 50872 - protein, 165 aa, Aegilops speltoides
VMASSATTVTPFHGLKSTAGLPVSRRSSGSLGRVSNGGRIRCMQVWPIEGIKKFETLSYLPPLSTEALLKQVDYLIRSKWVPCLEFSKVGFVFREHNSSPGYYDGRYWTMWKLPMFGCTDATQVLNEVEEVKKEYPDAYVRVIGFDNLRQVQCVSFSAFRPPGCE

SEQ ID NO: 50873 - protein, 452 aa, Rubrobacter xylanophilus DSM 9941
MTVQEAIDRIGFGRFQKRLLAVCGVTWVADSAEILMLGFALPSIIAEFAISPAQAGLIATATFAGMLVGAWFWGTVSDYIGRRTGFQLTVLTFAVFGLLSAFAPSWEWLAVLRFITGFGLGGALPLDFSVYAEFLPSENRGRNLVILESFWAVGTILAAGLAWLLVPSFGWRPLLAASALAALLVLWIRKSIPESPRFLAISGRADEAKEILTGIAAENGRPAPEQTLVAGERQGGVTVTRLWVPGIRRSTLMLWIAWFCVALAYYGIFTWLPSTFAEQGFSPLRTYQSTFILALAQLPGYFSAAYLIERIGRRNTLGLYLLASGVFTFLFATASGFGWILTASILMSFFSLGAWGALYAWTPELYPTEIRATGMGWASGMSRIAGVFAPILGGILFGLATTAGGSLLYVLSLWSASFIVGGIVVFLLGVETKRRALSDTVSDSSEEVAKEV

SEQ ID NO: 50874 - protein, 425 aa, Leifsonia xyli subsp. xyli str. CTCB07
MPTASLTYPGGVAEFPMLPSSQGPGSIDLSSFTRQTGLTSLDYGFVNTAATRSSITYIDGDAGILRYRGYPIEQLAGNSTFLEVAWLLIHGELPSASELADFDARIRRHTLLHEDLRRFFSALPHDAHPMSVLSSAVSALSTFYQDSLSVHDPEQVELSTVRLLAKLPVIAAYAHKKSIGQAFLYPDNSLSFVDNFLRLNFGTLAEPYEVDPVLSRALERLLILHEDHEQNASTSTVRLVGSTQANLFASVSAGINALYGPLHGGANEAVLQMLAGIRDSGEGVQKFVERVKNKESGVKLMGFGHRVYKNFDPRARLVKQSADEVLSALGVHDPLLDIAKELEEVALADQYFIDRKLYPNVDFYTGVIYKAMGFPTRMFTVLFAIGRLPGWIAHWREMMLDPGTKIGRPQQLYVGSPERSWPSSR

SEQ ID NO: 50875 - protein, 136 aa, Brassica napus
QIQKPLKPSLRPPLIPNEDESEKQEVEEGFFTSLGKLIGGAKSSVAEIVGAAFSRKKRPSVHHYQQGRASPWPVQESYAIPRDETPPVVDTRTPTPRKNYAFMSKEPEKIHHIRQGRAPYNGWNNGESPQQQQQQQ

SEQ ID NO: 50876 - protein, 165 aa, Aegilops speltoides
VMASSATTVTPFHGLKSTAGLPVSRRSSGSLGRVSNGGRIRCMQVWPIEGIKKFETLSYLPPLSTEALLKQVDYLIRSKWVPCLEFSKVGFVFREHNSSPGYYDGRYWTMWKLPMFGCTDATQVLSEVEEVKKEYSDAYVRVIGFDNLRQVQCVSFIAFRPPGCE

SEQ ID NO: 50877 - protein, 511 aa, Citrus unshiu
MGTESLVHVLLVSFPGHGHVNPLLRLGRLLASKGFFLTLTTPESFGKQMRKAGNFTYEPTPVGDGFIRFEFFEDGWDEDDPRREDLDQYMAQLELIGKQVIPKIIKKSAEEYRPVSCLINNPFIPWVSDVAESLGLPSAMLWVQSCACFAAYYHYFHGLVPFPSEKEPEIDVQLPCMPLLKHDEMPSFLHPSTPYPFLRRAILGQYENLGKPFCILLDTFYELEKEIIDYMAKICPIKPVGPLFKNPKAPTLTVRDDCMKPDECIDWLDKKPPSSVVYISFGTVVYLKQEQVEEIGYALLNSGISFLWVMKPPPEDSGVKIVDLPDGFLEKVGDKGKVVQWSPQEKVLAHPSVACFVTHCGWNSTMESLASGVPVITFPQWGDQVTDAMYLCDVFKTGLRLCRGEAENRIISRDEVEKCLLEATAGPKAVALEENALKWKKEAEEAVADGGSSDRNIQAFVDEVRRTSVEIITSSKSKSIHRVKELVEKTATATANDKVELVESRRTRVQY

SEQ ID NO: 50878 - protein, 432 aa, Burkholderia fungorum LB400
MNSKTHATLSFSDSDQTIDLPIYQGALGPDVIDIRKLYGQTGKFTYDPGFMSTAACNSAITYIDGDKGELLYRGYPIDNLAQNADFLETCYLLLKGELPNAQQKEEFVKTVTQHTMVHDQMHFFFRGFRRDAHPMAILVAAVGALSAFYHDSLDISNPEHREISAIRMIAKLPTLVAMAYKYTVGQPFVYPKNDLSYSANFMRMMFANPAEEYKVNDVLVRALDRILILHADHEQNASTSTVRLAGSSGANPFACIAAGIACLWGPAHGGANEAALNMLEEIGSVDNIPEFIAQVKDKNSGVKLMGFGHRVYKNYDPRAKLMRETCHEVLEELGLHDDPLFKLAMALEKIALEDDYFVSRKLYPNVDFYSGIVQRALGIPTAMFTCIFAMARTVGWIAQWNEMIADPEQKIGRPRQLFVGETQREAKPLAKR

SEQ ID NO: 50879 - protein, 165 aa, Aegilops speltoides
VMASSATTVTPFHGLKSTAGLPVSRRSSGSLGRVSNGGRIRCMQVWPIEGIKKFETLSYLPPLSTEALLKQVDYLIRSKWVPCLEFSKVGFVFREHNSSPGYYDGRYWTMWKLPMFGCTDATQVLSEVEEVKKEYPDAYVRVIGFDNLRQVQCVSFIAFRPPGCE

SEQ ID NO: 50880 - protein, 207 aa, Zea mays
SRMNSSIEIKTEGQAYHKRKRGINTSSDPASSSDNVDVDVIVDGKFEHGYIVTVIMGSKSTKAILYNCIEEPALPTPEPPVANNSTGLKGVRRRRRRRKKLSTTDPRHPKPNRSGYNFFFQDQHRILKPQYPAQDRLISKMIGERWNNLSPEDKAVYQQRGVEDKERYRTQLAAYKELRTGQPISNAVPIQQRLPLTEVTIDEVDSK

SEQ ID NO: 50881 - protein, 165 aa, Aegilops speltoides
VMASSATTVTPFHGLKSTAGLPVSRRSSGSLGRVSNGGRIRCMQVWPIEGIKKFETLSYLPPLSTEALLKQVDYLIRSKWVPCLEFSKVGFVFREHNSSPGYYDGRYWTMWKLPMFGCTDATQVLSEVEEVKKEYPDAYVRVIGFDNLRQVQCVSFIAFRPPGWE

SEQ ID NO: 50882 - protein, 463 aa, Bacillus cereus ATCC 14579
MQHTNKSGTLNRGLKERHITLMSLGSAIGVGLFLGSASAIKLAGPSILLGYMIAGLVIFFIMRALGEMAIEQPVAGSFSKYAYDYIGPLAGYITGWNYWFLWVVTCMAEITAAGIYMQYWFPDIPRWTWALLALLLMSAFNFLSVKVFGELEFWFALIKIVTIICMIVVGAGIILFGFGNGGIATGISNLWSHGGWFPNGFSGLLLSMQMVLFAYLGVELIGVTAGEAQNPKKTLAKAIDNVFWRILLFYVGALFVMMAIYPWNELGEKGSPFVLTFQQIGIAKAAGIINFVVLTAALSSCNGGLFSTGRMLYTLAQQKKAPERFGRLNKNGIPSQGIVATAIVLLIGVILNYLVPAKVFTWLTSISTFGAIWTWGIILVAQIKFRKSLPTQNKQKLSYKMPLYPLSSYFSLVFLVLVLGIMAYSEDTRIALIVGPIWLIGLAIVYYMKGFHKIDETPNSKIS

SEQ ID NO: 50883 - protein, 789 aa, Pseudomonas fluorescens PfO-1
MLPWLSTMAPSFTQWRTLDMAVAHTLGFPRIGADRELKKALEACWKGDLDQAALNQVGRELRARHWQLQKDAGIDLLPVGDFAWYDQVLTHSLTFGVIPERFDAVRDERGLPTLDTLFAMARGATSSCCGGEHGKTQYAQELTKWFDTNYHYLVPEFSADQQFKLSWEQLFDEVEEAKALGHNVKPVIIGPLTYLWLGKAKGNDFDKLDLLERLLPVYNQILGRLAAQGVEWVQIDEPILTLDLPQAWKSAFERAYHILQYSPLKKLVATYFSGLQDNLGLAVGLPVQGLHIDAVRAPDQLGQVLDRLPTYKILSVGLVNGRNVWRCELEQALAQLQPAQERFGDNLWVSSSCSLLHSPVDVEREDKLDPELKSWLAFAVQKCSEISVLRDALNDPQAPNVQSALAASRAIQQSRARSPRIHKAEVQARIEAINASDSQRHSPFAKRIAAQQARLKLPTFPTTTIGSFPQTGSIRLARQAYKQGKLSANDYHDAMRSEIRHAVQVQERLGLDVLVHGEAERNDMVEYFAEQLDGYLLTRFGWVQSYGSRCVKPAVIYGDLSRPNAMTVDWITYAQGLTDKVMKGMLTGPVTMLMWSFPREDVSRKVQAQQLALALRDEVVDLENAGIRIVQIDEAAFREGLPLRREQWQEYLDWAVEAFRLTASGVKDETQIHTHMCYSEFNDVIKAIADMDADVITIETSRSDMELLEAFEAFDYPNDIGPGVYDIHSPRVPDTAEMVKLMSKAVKRIPAQRLWVNPDCGLKTRAWPETEAALVNMVAAARQLRSQLA

SEQ ID NO: 50884 - protein, 450 aa, Shewanella oneidensis MR-1
MKTKLSVLSAAMLAATLTMMPAVSQAAIPQSVEGQSIPSLAPMLERTTPAVVSVAVSGTHVSKQRVPDVFRYFFGPNAPQEQVQERPFRGLGSGVIIDADKGYIVTNNHVIDGADDIQVGLHDGREVKAKLIGTDSESDIALLQIEAKNLVAIKTSDSDELRVGDFAVAIGNPFGLGQTVTSGIVSALGRSGLGIEMLENFIQTDAAINSGNSGGALVNLKGELIGINTAIVAPNGGNVGIGFAIPANMVKNLIAQIAEHGEVRRGVLGIAGRDLDSQLAQGFGLDTQHGGFVNEVSAGSAAEKAGIKAGDIIVSVDGRAIKSFQELRAKVATMGAGAKVELGLIRDGDKKTVNVTLGEANQTTEKAAGAVHPMLQGASLENASKGVEITDVAQGSPAAMSGLQKGDLIVGINRTAVKDLKSLKELLKDQEGAVALKIVRGKSMLYLVLR

SEQ ID NO: 50885 - protein, 256 aa, Thermotoga maritima
MLEGKVAVVTGGGQGIGAAIAQLFAENGMKVVIAEIDEEAGVEREEMLRERGLDVTFVKTDVADENSVKNMVRKTVEIYGGVDVLVNNAAVMSVKSIFERPLEEWERVIRVNLTGPYICSRYCAEEMIKTRWRSDHNIASTRAFQSEPDTEPYSASKGGLVALTHSLAVSLSRYHIRVVSISPGWIETSEWKKKSLRKKPDLRPIDHEQHPAGRVGNPLDIAHLCVFLADDEKAGFITGTNFIVDGGMTVKMIYEE

SEQ ID NO: 50886 - protein, 360 aa, Shewanella oneidensis MR-1
MTIKDTLLYLGKAVLFGLIMAAMFLLVTHYFDNKSLGNSLLQNRGNNTVELSFAKAVRRAAPAVVNIYSLSIDQSRPLNSGSLQGLGSGVIMSKEGYILTNYHVIKKADEIVVALQDGRKFTSEVVGFDPETDLSVLKIEGDNLPTVPVNLDSPPQVGDVVLAIGNPYNLGQTITQGIISATGRNGLSSGYLDFLQTDAAINAGNSGGALIDTNGSLIGINTAAFQVGGEGGGHGINFAIPIKLAHSIMGKLIKNGRVIRGALGISGEPINPVVAQILNLPDLRGVLVTGIDPNGPAARAQLLPRDVIIKYDGEDVPGVEMLMDRIAETTPGKKVMMTVIRQGKQQELPVIIDEKVVVSN

SEQ ID NO: 50887 - protein, 372 aa, Bacillus cereus E33L
MKAEEKFSPGLDGIVAAETKISFLDTVKGEIVIQGYDLIELSKTKEYLDIVHLLLEEHLPNEDEKATLEKKLKEEYAVPEGVFNVLKALPKETHPMDGLRTGVSALAGYDNDIENRSLEVNKSRGYKLLSKVPNIVANSYHILNNEDPIEPLEELSYSANFFYMLTGKKPTELEEKIFDRSLVLYSEHEMPNSTFTARVIASTQSDLYGALTGAVASLKGSLHGGANEAVMYMLLEAGNVEKFEELLQKKLYNKEKIMGFGHRVYMKKMDPRALMMKEALKQLCDVKGDYTLYEMCEAGEKIMEKEKGIYPNLDYYAAPVYWMLGIPIQLYTPIFFSSRTVGLCAHVIEQHTNNRLFRPRVNYIGERHVLSK

SEQ ID NO: 50888 - protein, 540 aa, Zea mays
MGNQCQNGTYGYGSNYNSYNHFQKEPLASRHCDGDDTEDCYTGPSRPSIADLMRQGLRQTLTSISVLGRETPNVTEHYTIGRQLGEGLTGTTYLCTETSTGCQFACKSILKTRFRNMQDVEDVRREVQIMRYLSGQKDVVAIKEAYEDEEAVHIVMELCEGGELYDRIKKGNYSEQKAAHLIRTIVGVIENFHSLGVMHRDLKPENFLLQDKDDDLSIKVIDFGLSVFFKPGEVFTETVGSPYYIAPEVLQKHYGPEADVWTAGVILYVLLSGVPPFWADTHEGVLDKVRDGHFDFESDQWHMISDSAKDLIRKMLCPCPSERLKAHEVLKHPWICDNGVATHQTLDPTVLSRTNKLSAVNKSKKLALQVIAKHLSEEEIARLRGMFKAMDNGNNVVITLSELKEGLSKCGSVFRNIEISDIVEADDYDGNTNINWEEFIAVTVPLNKTEHKEHLMAALTYFDKDGGDYITVDELQKASVEHEMKNAFLEDTIYQVDQNNDGQTNYGEFVTMMQSDSSGLGWQTMESSMNVPLREAPEVY

SEQ ID NO: 50889 - protein, 152 aa, Brassica napus
  misc_feature (149)..(149): Xaa can be any naturally occurring amino acid
  unsure (1)..(152): unsure at all Xaa locations
VLGTNALCLKLQSSLSSSRAMSSTTEADAESVLRLVTPSLDLKRHKGQAGKIAVIGGCREYTGAPYFAAISALKIGADLSHVFCTKDAAPVIKSYSPELIVHPVLEESYTISHFSEEERRQVQEKVVGEVEKWMEIFDCLVIGPGLGRXPFL

SEQ ID NO: 50890 - protein, 705 aa, Rhodopseudomonas palustris CGA009
MAKSAKPTKNRTATIHDQKMSRGEGGELHQTAEDLGTEVMTTAQGGPISDDQNTLKIGPRGPALIEDFHFREKIFHFDHERIPERVVHARGYGAHGFFETTHSLAKFSRADLFQRVGERTPAFVRFSTVAGSKGSVDLARDVRGFAVKIYTKEGNWDLVGNNIPVFFIQDAIKFPDLIHSVKEEPDRAFPQAQSAHDNFWDFISLTPESMHMVMWVMSDRAIPRSFRFMEGFGVHTFRLVNADGESTFVKFHWKPKLGMQSVLWNEAVKINGADPDFHRRDLWTAISTGNFPEWELRVQLFDQEFADKFDFDILDATKIIPEEIIPPVPVGRLVLDRMPDNFFAETEQVAFMTQNVPPGIDFSNDPLLQGRNFSYLDTQLKRLGSPNFAHLPINAPKCPFAHFQQDGHMAMHNPVGRANYQPNSHGLGPRESPQRGFVPFPEAEEGAKAKFRAESFADHYSQARQFYLSQTRTEQHHIVSALTFELSKVEISVIRERVLSHLLLIDETLATNVANRLGIKAMPKPADAAVPTRQDLPPSPALSIIENGPERFGGRKLGILITDGTDAALLKSLQKAVEKAGATFELIAPRVGGVIASDGSEIAAHQMIDGGPSVLYDAVALLPGDDEIDDLLQESTARDFVADAFAHCKFIGYVAAARPLFAKAGIGDDLDEGCIELAARKDAGAFVDQLGKLRVWARESVVKMR

SEQ ID NO: 50891 - protein, 353 aa, Triticum aestivum
MTTGGNGEEQQGRRLFGVSLTDRPVWQQFLICSSGFFFGYLVNGICEEYVYNRLQFSYGWYFTFVQGFVYLALIRLQGFTMKHMVNPWRTYVRLSAVLMGSNGLTKGSLAFLNYPAQIMFKSTKVLPVMIMGAFIPGLRRKYPFHEYVSAVMLVIGLILFTLADAQTSPNFSMIGVAMVSSALIMDAFLGNLQEAIFKMNPDTTQMEMLFCSTVVGLPFLAVPMVLTGELTTAWSACSQHLYVYAVLVFEAMATFVGQVSVLSLIALFGAATTAMVTTARKAVTLLLSYLIFTKPMTEQHVTGLLLITMGIVLRLLPEDKEKKGMAERQQAKAQRGEEKRRGDGVEEETSPLV

SEQ ID NO: 50892 - protein, 143 aa, Populus tremula
MISPSFISPLFTLAVVLTVTITPLISASGGFCQEKMATLGGVHDSQSSQNSAEIDGLARFAVDEHNKKENAILEFARVVKAKEQVVAGTMHHLTIEAIEVGKKKLYEAKAWVKPWLNFKELHEFKDASDVPVFTSSDLGVKRG

SEQ ID NO: 50893 - protein, 582 aa, Geobacillus kaustophilus HTA426
MNSFRTRLLFWLVTLIATVLIALGLLLGQLLKDFYAETMNKRMEKEAQALAILLENEPLEQIRADLQEMGNELSSRITVLDKEERVRFDSGRVAAISDKDHERIVRAILRKKQFPRFSVIEKTNDVYYYIVPYERGERSGYVVLSTPTSSLQKVNEQIWGVLTSSLGMALVVIIALVWKIANQYMKPIEEATKVAFELEKGNYAARVPDGEYNEAGMLVRSINRLARHLQEMSRAREIQTDRLHTLIENVGSGLLFIDHRGHISLINRAFQTQFHLDPSDCLHRPYADVLPHGDIVRFIDDIFITETTMRRHMRLTIGIERKHFDVYGAPIIGTNAEWKGIVVVFHDITELKRLEQIRKDFVANVSHELKTPVTSIKGFAETLLDGAMKDEAALEHFLTIILKESERLQTLVEELLDLSKIEQHGFQLQLEDVDIAQVIAEAAAVFRQKAAEKQIDLHIESPSGLVIRGDRNRMKQILLNLLANAITYTPEHGRVAVEAEETEKEVLIHVKDTGIGIEEKEIPRIFERFYRVDKARSRDSGGTGLGLSIVKHLVEAHHGYITVASKVGRGTVFTIHFPKPGR

SEQ ID NO: 50894 - protein, 234 aa, Burkholderia mallei ATCC 23344
MKLPQRLAAEVFGTFWLVLGGCGSAVLAAAFPGLGIGFAGVALAFGLTVLTMAFAIGHVSGCHLNPAVSVGLTVAGRFPARDLVPYVIAQVIGATLGAFVLYLIATGKPGFDVAGSGFATNGYDARSPGHYSLAAAFICEVVLTGFFLFVILGSTDKRAPAGFAPIAIGLCLTLIHLISIPVTNTSVNPARSTGPALFVGGEAIGQLWLFWVAPIIGAAIAGVVYPLVAGRDES

SEQ ID NO: 50895 - protein, 399 aa, Rhodopseudomonas palustris CGA009
MTSLPPHAPPPPPRPPGLDPLASQQAQVRRTQRTDRLLRIAIVWLLVLATLWVAQPYLSALWFSATGPRTVTARGELAPAEKATVDLFKQVSPSVVHVFAQGSQRVSPFAVQQEAPVQSGSGVIWDAAGHVVTNNHVIQNASQLGVRLASGEFVTARVVGTAPNYDLAVLQLERPHTPLRPIAIGSSEDLQVGQATFAIGNPYGLEQTLTTGIVSALRRRLPTAAAHEVRGVIQTDAAINPGNSGGPLLDSAGRLIGINTAIISGSGASAGIGFAIPVDAVNRVVTALITNGSVPVPGIGIVAARETETAQLGIDGVVILRTLPDSPAAQAGLEGATDDGYVRDVITGANGSDIHSMSDLAAALEEAGIGRDVKLTVERDGRARTVTVKVTDISQRRRT

SEQ ID NO: 50896 - protein, 573 aa, Pseudomonas syringae pv. tomato str. DC3000
MRRRKRRLEKMTTTSRPLYISYAGPSLLEMPLLNKGSAFTPQERIEFNLIGLLPQNVETIEEQVTRVYSQYKQCASDLDKHIYLRSIQDNNETLFFRLLDSHLDEMLPIIYTPTVGQACQEFSKIYRTHRGLFISYPERDRIDDILRSATKDRIKIIVVTDSERILGLGDQGIGGMGIPIGKLSLYTACGGISPAYTLPIVLDVGTNNRELLDDPMYMGWRHERVSGKEYEDFIALFIDAVQRRWPDVLLQFEDFAQSNAMPLLEKYRDELCCFNDDIQGTASVAVGTLLAACKAKNETLGQQKVVFVGAGSAGCGIAEHIIAAMRIEGLSESEARKRIFMVDRFGLLTEGMGNLLDFQLRLAQKSADVAGWTAGTETFPQLLDVVTHAGATVLIGVSGQRGLFTEQVVRELYKHCAKPLVMPLSNPTSKVEATPEEILRWTDGNALVATGSPFAPVEINGRTVHIAQCNNSYIFPGIGLGVVACKASRITDRMLMAASNALAECSPMVTGQGDAVLPPLKEIQQVSRKIALAVAKEAQAEGLALETSEEALLAAIERNFWLPGYRAYRRRSV

SEQ ID NO: 50897 - protein, 548 aa, Escherichia coli
MAAKDVKFGNDARVKMLRGVNVLADAVKVTLGPKGRNVVLDKSFGAPTITKDGVSVAREIELEDKFENMGAQMVKEVASKANDAAGDGTTTATVLAQAIITEGLKAVAAGMNPMDLKRGIDKAVTAAVEELKALSVPCSDSKAIAQVGTISANSDETVGKLIAEAMDKVGKEGVITVEDGTGLQDELDVVEGMQFDRGYLSPYFINKPETGAVELESPFILLADKKISNIREMLPVLEAVAKAGKPLLIIAEDVEGEALATLVVNTMRGIVKVAAVKAPGFGDRRKAMLQDIATLTGGTVISEEIGMELEKATLEDLGQAKRVVINEDTTTIIDGVGEEAAIQGRVAQIRQQIEEATSDYDREKLQERVAKLAGGVAVIKVGAATEVEMKEKKARVEDALHATRAAVEEGVVAGGGVALIRVASKLADLRGQNEDQNVGIKVALRAMEAPLRQIVLNCGEEPSVVANTVKGGDGNYGYNAATEEYGNMIDMGILDPTKVTRSALQYAASVAGLMITTECMVTDLPKNDAADLGAAGGMGGMGGMGGMM

SEQ ID NO: 50898 - protein, 288 aa, Schizosaccharomyces pombe
MNYQRLEKLGEGTYAHVYKGQNRVTGEIVALKVIRIDADEGTPSTAIREISLMKELRHPNIMSLSDVLQTENKLMLVFEYMEKDLKKYMDTYGNQGALPPSQVKNFTQQLLKGISFCHENRVLHRDLKPQNLLINSRGELKLADFGLARSIGIPVNTFSNEVVTLWYRAPDVLLGSRVYSTSIDIWSVGCIMAEMATGRPLFAGSNNEDQLLKIFRLLGTPTEQSWPGISLLPEYKPTFPIYKAQDLAYLFPTFDPLGLDLLRRMLRLQPELRTTGQDALQHAWFLTA

SEQ ID NO: 50899 - protein, 468 aa, Burkholderia mallei ATCC 23344
MSTLETAIAGAPAADAAAGAATPGAIIARIERLPANAMQIRARVLIGTATFFDGFDVITIAATLPLLIHKWGLSPNQIGMLIASGAIGQLLGAFLFPALAQKHGRVRAIAWSSAVIGVTSIACGFASTFETFVLLRIVQGLGLGGELPVAATYINEITRAHGRGRFVLLYEIVFPIGLLASMAFGAWLVPRFGWEVMYFIGGMPLLLALVLTRLVPESPRWLASRGRLDEAGRALHAFEASVKEPLPPVAHAGEFDTLVLSHPKRRMVDLFGPAYLKRTLAVATLWATCGFIQYGLSTWLPTIYKNFYHAPLQLALNLAVIGSVMGVAGSLVSALAVDVVGRKPVIVWSFVLCALSLVFAGVYHASSVYVVAAFCSLALGLMASGFITSYVYTPEQYPTSIRAAGCGLGSAWLKIASFVAPMVVPRAIVGGDLSPAFYLLAAVPLIAALTVHSVGIETKGQVLEKLEA

SEQ ID NO: 50900 - protein, 143 aa, Populus tremula
MISPSFISPLFTLAVVLTVTITPLISASGGFCQEKMATLGGVHDSQSSQNSAEIDGLARFAVDEHNKKENAILEFARVVKPKEQVFAGTMHHLTIEAIEAGKKKLYEAKVWVKPWLNFKELHEFKDAGDVPVFTSSDLGVKRG

SEQ ID NO: 50901 - protein, 196 aa, Triticum aestivum
  misc_feature (148)..(148): Xaa can be any naturally occurring amino acid
  misc_feature (182)..(182): Xaa can be any naturally occurring amino acid
  misc_feature (185)..(185): Xaa can be any naturally occurring amino acid
  unsure (1)..(196): unsure at all Xaa locations
MSVPEAGQSAGRDEQEMDDYEQHQTRVLMALMQGLCAARYRKADNTPCLVDQGLYLGSVGAALNNEALKSLNITHILVVARSLNPAFPAEFTYKKIEVLDSPDTDLGKHFGECFTFIDEGICTGGNVLVHCFAGRSRSVTVVLAYLMXKHQMSLQSAMSLVRSKRPQIAPNAGFISQLVNFXKSXQVEQGQRTLQN

SEQ ID NO: 50902 - protein, 377 aa, Pisum sativum
MSVAELKERHIAATETVNNLRERLKQRRLSLLDTDIAGYARSQGRAPVTFGPTDILCCRTLQGHTGKVYSLDWTSEKNRIVSASQDGRLIVWNALTSQKTHAIKLPCAWVMTCAFSPTGQSVACGGLDSVCSIFNLNSPTDRDGNLNVSRMLSGHKGYVSSCQYVPGEDTHLITGSGDQTCVLWDITTGLRTSVFGGEFQSGHTADVLSISINGSNSKLFVSGSCDATARLWDTRVASRAVRTFHGHEGDVNSVKFFPDGNRFGTGSEDGTCRLFDIRTGHQLQVYNQQHQDNEMAHVTSIAFSISGRLLIAGYTNGDCYVWDTLLAKVVLNLGSLQNSHEGRITCLGMSADGSALCTGSWDTNLKIWAFGGHRKVI

SEQ ID NO: 50903 - protein, 328 aa, Campylobacter jejuni RM1221
MKILISGGAGYIGSHTLRQFLKTDHEICVLDNLSKGSKIAIEDLQKIRAFKFFEQDLSDFQGVKALFEREKFDAIVHFAASIEVFESMQNPLKYYMNNTVNTTNLIETCLQTGVNKFIFSSTAATYGEPQTPVVSETSPLAPINPYGRSKLMSEEVLRDASMANPEFKHCILRYFNVAGACMDYTLGQRYPKATLLIKVAAECAAGKRDKLFIFGDDYDTKDGTCIRDFIHVDDISSAHLATLDYLQENESNVFNVGYGHGFSVKEVIEAMKKVSGVDFKVELAPRRAGDPSVLISDASKIRNLTSWQPKYDDLELICKSAFDWEKQC

SEQ ID NO: 50904 - protein, 548 aa, Escherichia coli
MAAKDVKFGNDARVKMLRGVNVLADAVKVTLGPKGRNVVLDKSFGAPTITKDGVSVAREIELEDKFENMGAQMVKEVASKANDAAGDGTTTATVLAQAIITEGLKAVAAGMNPMDLKRGIDKAVTAAVEELKALSVPCSDSKAIAQVGTISANSDETVGKLIAEAMDKVGKEGVITVEDGTGLQDELDVVEGMQFDRGYLSPYFINKPETGAVELESPFILLADKKISNIREMLPVLEAVAKAGKPLLIIAEDVEGEALATLVVNTMRGIVKVAAVKAPGFGDRRKAMLQDIATLTGGTVISEEIGMELEKATLEDLGQAKRVVINKDTTTIIDGVGEEAAIQGRVAQIRQQIEEATSDYDRDKLQERVAKLAGGVAVIKVGAATEVEMKEKKARVEDALHATRAAVEEGVVAGGGVALIRVASKLADLRGQNEDQNVGIKVALRAMEAPLRQIVLNCGEEPSVVANTVKGGDGNYGYNAATEEYGNMIDMGILDPTKVTRSALQYAASVAGLMITTECMVTDLPKNDAADLGAAGGMGGMGGMGGMM

SEQ ID NO: 50905 - protein, 279 aa, Gluconobacter oxydans 621H
MSSQVPSAEAQTVISFHDGHTMPQIGLGVWETPPDETAEVVKEAVKLGYRSVDTARLYKNEEGVGKGLEDHPEIFLTTKLWNDEQGYDSTLRAYEESARLLRRPVLDLYLIHWPMPAQGQYVETWKALVELKKSGRVKSIGVSNFESEHLERIMDATGVVPVVNQIELHPDFQQRALREFHEKHNIRTESWRPLGKGRVLSDERIGKIAEKHSRTPAQVVIRWHLQNGLIVIPKSVNPKRLAENLDVFGFVLDADDMQAIEQMDRKDGRMGADPNTAKF

SEQ ID NO: 50906 - protein, 548 aa, Escherichia coli
MAAKDVKFGNDARVKMLRGVNVLADAVKVTLGPKGRNVVLDKSFGAPTITKDGVSVAREIELEDKFENMGAQMVKEVASKANDAAGDGTTTATVLAQAIITEGLKAVAAGMNPMDLKRGIDKAVTAAVEELKALSVPCSDSKAIAQVGTISANSDETVGKLIAEAMDKVGKEGVITVEDGTGLQDELDVVEGMQFDRGYLSPYFINKPETGAVELESPFILLADKKISNIREMLPVLEAVAKAGKPLLIIAEDVEGEALATLVVNTMRGIVKVAAVKAPGFGDRRKAMLQDIATLTGGTVISEEIGTELEKATLEDLGQAKRVVINKDTTTIIDGVGEEAAIQGRVAQIRQQIEEATSDYDREKLQERVAKLAGGVAVIKVGAATEVEMKEKKARVEDALHATRAAVEEGVVAGGGVALIRVASKLADLRGQNEDQNVGIKVALRAMEAPLRQIVLNCGEEPSVVANTVKGGDGNYGYNAATEEYGNMIDMGILDPTKVTRSALQYAASVAGLMITTECMVTDLPKNDAADLGAAGGMGGMGGMGGMM

SEQ ID NO: 50907 - protein, 325 aa, Listeria monocytogenes EGD-e
MNLKKHSERKFDLITVGRACIDLNAVEYNRPMEETMTFSKYVGGSPANIAIGTAKLGLKVGFIGKISDDQHGRFIEKYMRDLAINTDGMVKDTEGRKVGLAFTEIKSPDECSILMYRENVADLYLTPEEISEDYIKEARVLLISGTALAQSPSREAVLKAVSLARKNDVVVAFELDYRPYTWKNSEETAVYYSLVAEQADVIIGTRDEFDMMENQVGGKNEATKAYLFQHQAKIVVIKHGVEGSFAYTKAGETFQAQAYKTKVLKTFGAGDSYASAFLYGLFSDESIETALKYGSAAASIVVSKHSSSDAMPTADEIKALIAQAE

SEQ ID NO: 50908 - protein, 356 aa, Oryza sativa
PTRPASRVVNKKPPRRSLNVSGPVQPYNPSLKNFWYPVAFSSDLKDDTMVPIDCFEEQWVIFRGKDGRPGCVMNTCAHRACPLHLGSVNEGRIQCPYHGWEYSTDGKCEKMPSTKMLNVRIRSLPCFEQEGMVWIWPGNDPPKSTIPSLLPPSGFTIHAEIVMELPVEHGLLLDNLLDLAHAPFTHTSTFAKGWSVPSLVKFLTPSSGLQGYWDPYPIDMEFRPPCMVLSTIGISKPGKLEGKSTKQCSTHLHQLHICLPSSRNKTRLLYRMSLDFAPWIKHVPFMHILWSHFAEKVLNEDLRLVLGQQERMINGANVWNWPVSYDKLGIRYRLWRDAIERGVDRLPFSNQSESGS

SEQ ID NO: 50909 - protein, 181 aa, Brassica napus
GGYFEMTNFPPRVVEEIYKVASIALSPNVSAQIFMGLMVSPPKPGDISYDQFARESKGILESLRRRAKIMTDGFNSCKNVVCNFTEGAMYSFPQIKLPPGALQAAKQAGKVPDVFYCLKLLEATGISTVPGSGFGQKEGVFHLRTTILPAEEEMPEIMDSFKKFNDEFMTQYENSFGYSRM

SEQ ID NO: 50910 - protein, 152 aa, Triticum aestivum
  misc_feature (59)..(59): Xaa can be any naturally occurring amino acid
  misc_feature (71)..(71): Xaa can be any naturally occurring amino acid
  unsure (1)..(152): unsure at all Xaa locations
MSIVRRSNVFDPFADLWADPFDTFRSIVPAISGGSSETAAFANARMDWKETPEAHVFKXDLPGVKKEEVKXVEVEDGNVLVVSGERTKEKEDKNDKWHRVERSSGKFVRRFRLPEDAKVEEVKAGLENGVLTVTVPKAEVKKPEVKAIEISG

SEQ ID NO: 50911 - protein, 273 aa, SYNECHOCOCCUS SP. WH 8102
MNDFLAAAVQLTSSQDPEINFNAAEEQIDLAARRGADLVGLPENFAFMGEDSRRLELASDLAERCSRFLVTMARRYQVVLLGGGFPAPVGDGSRTLNRAELVDRDGQLLARYDKIHLFDVDLPDGNTYRESATVNAGQELPPVVDVPGLCKVGLSICYDVRFPELYRHLVGAGADLLMIPAAFTAFTGKDHWQVLLQARAIENTAYVLAPAQTGQHYGRRHSHGHALVIDPWGTVLADAGVLPGAAIAPVNTAHQGHVRDQMPSLRHRRPALF

SEQ ID NO: 50912 - protein, 519 aa, Magnetococcus sp. MC-1
MQPLLTAEQMRRVDQDTIERFGLPGMVLMENAGRACVDLLYARLPDLARRRVLILCGGGNNGGDGLVIARWLRDAGVDTRVVLFTPADRLTGDAATNQRLYTRLGGELREALHEEDLAKLPSWLGHAGVVVDALLGTGLERAVEGHFALAIEQLNASRKPVLAVDLPSGIHADTGQILGCAVRATWCVTFAAAKIAHYTHPGAEHCGEITVAPIGIPRPMLERPEHTVSLNSPARWHPPARSPASHKGNHGHLLILGGSRGKGGAPALAAMAAQRMGSGLITCAVPRSVQPQVASLCPEAMTFAMDEESDGGILPEHRGPCKQLGFNPSVVAVGPGLGTGGGAAELIAQLMITPLPMVMDADALNLLALQPGLLRAHRAPELVLTPHPGEFSRLCGHRVEEIQADRVTIARNFARSWRVWLVLKGAGTVIASPDNRVWINPTGNHGLATGGSGDLLTGCIAGLMAQGWSLQDATLAGVWMHGRAAELSAAEQGGAAGMQSRDLLPYLRRLRNQLPQTTP

SEQ ID NO: 50913 - protein, 282 aa, Marchantia polymorpha
QLTESDIMIPIESFEEPWVLFRGKDGRAGCVRDECAHRACPLSLGTVVDGRIQCPYHGWEYNTGGKCEKMPSTRPLKTGIRALPCIEQDGMVWIWPGDETPAATLPSLLPPENYTIHAEIVLELPVEHGLLMENLLDLAHAPFTHTSTFAKGWSVPNMVKFKTPMQALSGNWDPYPIDMAFQPPCMVLSTIGLVKPGKLDGSSTASCSKHLHQLHVCMPSSRGKTRLMYRWLWTLPNGRSMPYIDRVWTHLANQVLNEDLRLVEGQQDRMKRGANVWQTPVG

SEQ ID NO: 50914 - protein, 230 aa, Arabidopsis thaliana
  misc_feature (147)..(147): Xaa can be any naturally occurring amino acid
  unsure (1)..(230): unsure at all Xaa locations
MQIFVKTLTGKTITLEVESSDTIDNVKAKIQDKEGIPPDQQRLIFAGKQLEDGRTLADYNIQKESTLHLVLRLRGGMQIFVKTLTGKTITLEVESSDTIDNVKAKIQDKEGIPPDQQRLIFAGKQLEDGRTLADYNIQKESTLHLVXLRLRGGMQIFVKTLTGKTITLEVESSDTIDNVKAKIQDKEGIPPDQQRLIFAGKQLEDGRTLADYNIQKESTLHLVLRLRGGF

SEQ ID NO: 50915 - protein, 388 aa, Nocardia farcinica IFM 10152
MITIYRMTTSSPSDLLPVTVLSGFLGAGKTTLLNHILANREGRRVAVIVNDMSEVNIDAALVAGQGHLDRTEEKLVELTNGCICCTLREDLIESVGKLAREGRFDQLVIESTGISEPMPVAASFEWEFEDGFRLGDLARLDTMVTVVDASTFLAEVVRGHTLASRDLQAGEGDERTIADLLVDQVEFADVLLLNKTDLVSENAAGTVEATLRRMNPRARVLRTAHGVVDLAEVLGTGRYNPVLAAASEGWTEELAGGHVPETEEYGIRSLTFTAERPFHPARLAAVLDQLRGLLRSKGFCWIASRSQFAALWSQAGPNLSFEPASWWSALDIPPGQEIVFIGVKLDVDGLRAQLADALLTDAEFAAGPAAWATYPDPFPAWGELHEHA

SEQ ID NO: 50916 - protein, 533 aa, Thermococcus kodakarensis KOD1
MTKFIFVTGGVVSGLGKGITSASIGMLFKARGFRTTNIKIDPYLNYDAGTMNPYQHGEVFVLDDGGEVDLDLGNYERFLDTSLSFDHNITTGKVYSAVIEKERKGEYLGATVQVIPHITNEIKERIRRIARDYDVVVVEIGGTVGDIESMPFLEAARQMQIEEGRENVAFVHVTYVPRLRVVGEQKTKPTQHSVKELRSLGIQPDAIVARSEDPLEDSARRKISLFTNVPEEAVISAYDVEDTYEVPLMLEKEGLPAYLARRLGLPEREPDLEAWREMVEKYKSLTDTVEIAIVGKYVKLADSYLSIKEALKHSSVANDVKVKIRWIEAEDVERQGVKLLEGVDGIIVPGGFGARGTEGKMMAIRYARENNIPFLGICFGFQLTVVEFARNVLGLEGAHSTEIDPQTPYPVVDLMPEQRDLDRLGGTMRLGAYPVHIKPNTLARRLYGREIVYERHRHRWEVNPDYVEKFEEAGLVFSGIAGDDERRMEILELPGHSYFIATQFHPEFKSRPMRPAPVFRGLVEAAKKKKYGS

SEQ ID NO: 50917 - protein, 551 aa, Ehrlichia ruminantium
MANMVVTGEQLDKSIREVVRILEDAVGCTAGPKGLTVAISKPYGAPEVTKDGYKVMKSIKPEDPLALAIANIIAQSASQCNDKVGDGTTTCSILTAKVIEEVSKVKAAGADIICVREGVLKAKEAVLEALKCMKREVLSEEEIAQVATISANGDKNIGTKIAQCVKEVGKDGVITVEESKGFKELDVEKTDGMQFDRGYLSPYFVTNSEKMLVEFENPYILLTEKKLNIIQPLLPILENIARSGRPLLIIAEDVEGEALSTLVLNKLRGGLHVAAVKAPGFGDRRKDMLGDIAILTGAKHVINDELAIKMEDLTLCDLGTAKNIRITKDTTTIIGSVDNSCAHVQSRICQIRMQIDNSTSDYDKEKLQERLAKLSGGVAVLKVGGSSEVEVKERKDRVEDALHATRAAVEEGVVPGGGAALLYTLSALDNLKSKNDDEQLGINIVKRALQAPIKRIIKNAGSENAPCVIAHLLKQNDKELIFNVDVTNFANAFTSGVIDPLKVVRIAFDFAVSLAAVFMTLNAIVVDIPSKDDNSAAGGAGMGGMGGMGGF

SEQ ID NO: 50918 - protein, 471 aa, Bacillus cereus ATCC 14579
MNQQIEQTDLKRTMKSRHLFMIALGGVIGTGLFMGSGQIVHNAGPGGAILAFLVGGFVMYLTMLCLGELSVAMPEAGSFQSYASKFISPGFGFVVGWMYWLNWAVTVGVELTTVSILMKRWFPDVSSWIWCVTFAAALFLVNALSAKAYAEAEFWFASVKVATIVIFIVLGGAVMFGLLDFNGKPAPMLHNFTENGGLFPNGALAVLLTMITVNYSFQGTELIGIASGESENPEKTIPKAIKNTIWRTLFFFVLAISVVVGLLPWQEANLVESPFVLVFDVAGVPYAADIMNFVIITAVLSVANSGLYANSRMLWAMAKQGMASPAFTKLTKKGVPLNALIFSLIFASLSLLTSVFAADTVFLVLTSIAAMAAVVVWMSIAASQFFFRRNFVKNGGNINDLKYRTPLYPLVPIVAFSLNFITFVSLAFIPDQRIALYCGIPFMIICYILYQVKYKKIVTLEQPRTVIREIN

SEQ ID NO: 50919 - protein, 353 aa, Pseudomonas syringae pv. tomato str. DC3000
MTQTALVVGASGIVGSAITQLLLENDWQVAALSRSPSTRPGVIPVAADLQDPASVTAALADLRPTHIFITTWSRQATEAENIRVNAAMVRNVLDAVRPAGSVKHVALVTGLKHYLGPFEAYGKGTLPQTPFRESQPRLDIENFYYAQEDEVFAAAEKDRFTWSVHRPHTVTGVAVGNAMNMATTLAVYASICKATGRPFVFPGSRVQWDSLTDMTDARQLAHQQLWAATTPAAANQAFNITNGDVFRWSWMWGQIAGYFGLEPADFPSQPALLETQMADDQTAWTRIAQEHQLKESDINRLISPWHTDADLGRPIEVVTDMSKSRKLGFTAFQASDDAFFEVFEKLRRDRLIP

SEQ ID NO: 50920 - protein, 420 aa, Nocardia farcinica IFM 10152
MTETVAVARTAQDIDATGRPPVLDVVIPVYNEEADLGDCVHRLHEYLRGGFPFPARITIADNASTDATLRVAHELATRYPGLRVVHLEAKGRGRALRAVWERSDAQVVAYMDVDLSTDLDALLPLVAPLVSGHSDLAIGTRLDTSSRVVRGPKREIISRCYNLILKASLRAHFSDAQCGFKAVRTAVARQLLPLVEDGEWFFDTELLVLAERAGLRIHEVPVDWIDDPDSRVDIVDTAIKDLRGVWRLARAISTGALPLDELRAAIGREPLVPGVPLGMVGQVVRFAIIGVLSTLAYMLLYLVLQPVAGAQGANFLALLLTAIANTAANRAFTFGVRGPGRVLTHQFQGLLIFGFGLLVTSGSLFALHRWAPAAPVHVELVVLVTANLVATLARFLGLRWVFRNPPAATPIRTGRTGAAR

SEQ ID NO: 50921 - protein, 391 aa, Bacillus cereus ATCC 14579
MDVAKELVLSKNQLVEWRRHFHKYPELSFQEEKTSQFVFDILRKFPYLEVSRPTKYSVMAKLVGKHPGKTVAIRADMDALPIHEENEFDFISTYKGVMHACGHDGHIAILLGVVHKLVEEREKIKGEIRFLFQHAEENFPGGAEEMVAAGVMEGVDYIIGAHLWASLEVGKIGVIYGPAMAAPDVFKIKIEGKGGHAGIPHETVDSIAIGTQVVSQLQQIVSRLTNPLDSLVISVTQFHAGTTHNVIPEQAEIEGTVRSLRHELRGETEKKIERIVKHITESYGAKYTFSYEYGYRPVVNDYEATELIEQTALQLYGRDRVVRLQPTMAGEDFSAFLQKAPGTFFFIGAGNKEKGIIYPHHHPRFTIDEDALPIGVEVFVSAIMNFISKGE

SEQ ID NO: 50922 - protein, 218 aa, Arabidopsis thaliana
  misc_feature (12)..(12): Xaa can be any naturally occurring amino acid
  unsure (1)..(218): unsure at all Xaa locations
MYAYKPQINPKXKRNTKTNIRTPGKNQSSLLEFEKMGMSKSKGNTHNIFLLCNYILLGSASSCIFLTISLRLFPSLSGLSLIFLYTLTIATAVSGCSIFASSTSATASDRLYGSHMVATVLTAIFQGAVSVLIFTRTGDFLRFLKSYVREEDGEVILKLSGGLCVLMFCLEWIVLVLAFLLKYSDYLDESVVDDDDFKVRRQEEDLKDWPSYPFQLKI

SEQ ID NO: 50923 - protein, 312 aa, Pseudomonas syringae pv. tomato str. DC3000
MFLVCGEALFDIFTRADDGGSLNRLGFDAIAGGSPFNVAIGLRRLGVEAAFFAGLSTDYLGRRLRAVLEQETVNAEHLIEFDAPTTLAMVAVGSDGSPTYSFRGDGCADRQLRLEHLPELDERVRGIHVGSFSLVVQPIADTLLALVARESARRLISLDPNVRLNPAPDIQRWRTQIAAFAEHAHLIKVSDEDLHLLYPDSDPQQIAEGWLGKRTQLVIVTRGTQGASVFTRQHGTWSVPAKTVVTADTVGAGDTFQAALLTFLSERQLDTPQGLSTLSRETLDEMLNFAVGAAALTCTKVGPDLPYRHQLG

SEQ ID NO: 50924 - protein, 217 aa, Zea mays
HASATPEQWEKIADVIQEKKHMPFFDVAYQGFASGSLDEDAFSVRLFVKRGMEVFVAQSYSKNLGLYSERVGAINVVCSAPEVADRVKSQLKRLARPMYSNPPIHGAKIVANVVGDPTMFGEWKQEMELMAGRIKNVRQKLYDSLSAKDKSGKDWSFILRQIGMFSYTGLNKAQSDNMTDKWHIYMTKDGRISLAGLSLAKCDYLADAIIDSFHNVN

SEQ ID NO: 50925 - protein, 372 aa, Geobacillus kaustophilus HTA426
MTVTRGLEGVVATTSSISSIIDDTLTYVGYDIDDLAENASFEEVVYLLWHRELPTKEQLEELKKQLAENAEIPNEIIEHFKLYPIDKVHPMAALRTAVSLLGLYDEEADVMTKEANYRKAIRLQAKIPTIVTAFARVRKGLEPVAPRKDLSFAANFLYMLTGKEPDDIATEAFNKALVLHADHELNASTFTARVCVATLSDIYSGITAAIGALKGPLHGGANEAVMKMLTEIGTVDNVEPYIRRKLANKEKIMGFGHRVYRKGDPRAKHLKKMSEKLTKLVGEPHWYEMSTKIEEIVTSEKALPPNVDFYSASVYHCLGIDHDLFTPIFAVSRTSGWLAHILEQYDNNRLIRPRAEYTGPGKRAYVPIDERG

SEQ ID NO: 50926 - protein, 523 aa, Chlorella sorokiniana
CRPPSSPSLSWPPGLRSPALPRAVACARGRSAKRDVAAKRLRSRSPRMDATTGDFTALQKAVKQMATKAGTEGLVHGIKNPELRQLLTEIFMKDPEQQEFMQAVREVAVSLQPVFEKRPELLPIFKQIVEPERVITFRVSWLDDAGNLQVNRGFRVQYSSAIGPYKGGLRFHPSVNLSIMKFLAFEQIFKNSLTTLPMGGGKGGSDFDPKGKSDAEVMRLWQSFMTELQRHISYVQDVPAGDIGVGAREIGYLFGQYKRITKNYTGVLTGKGQEYGGSEIRPEATGYGAVLFVENVLKDKGESLKGKRCLVSGAGNVAQYCAELLLEKGAIVLSLSDSQGYVYEPNGFTREQLQAVQDMKKKNNSARISEYKSDTAVYVGDRRKPWELDCQVDIAFPCATQNEIDEHDAELLIKHGCQYVVEGANMPSTNEAIHKYNKAGIIYCPGKAANAGGVAVSGLEMTQNRMSLNWTREEVRDKLERIMKDIYDSAMGPSREYNVDLAAGANIAGFTKVADAVKAQGAV

SEQ ID NO: 50927 - protein, 587 aa, Geobacillus kaustophilus HTA426
MKRKTKIVCTIGPASESVDKLVQLIEAGMNVARLNFSHGDHEEHGRRIANIREAARRTGQTVAILLDTKGPEIRTHNMENGAVELKEGAKLIISMSEVLGTPEKISVTYPGLIDDVSVGSKILLDDGLIGLEVNAVDKQAGEIATTVLNTGVLKNKKGVNVPGVRVNLPGITEKDRADILFGIRQGIDFIAASFVRRASDVLEIRELLEANDALHIQIIAKIENEEGVANIDEILEAADGLMVARGDLGVEIPAEEVPLIQKMLIKKCNMLGKPVITATQMLDSMQRNPRPTRAEASDVANAIFDGTDAVMLSGETAAGQYPVEAVRTMHQIALRTEQALEHRDILSQRTKESRTTITDAIGQSVAHTALNLDVAAIVTPTVSGKTPQMVAKYRPKAPIIAVTSNEAVSRRLALIWGVYTKEAPHVNTTDEMLDVAVDAAVRSGLVKHGDLVVITAGVPVGETGSTNLMKVHVISDLLAKGQGIGRKSAFGKAVVAKTAEEACRKMVEGGILVTISTDADMMPAIEKAAAIITEEGGLTSHAAVVGLSLGIPVVVGVENATSLFKDGQEITVDGGFGAVYRGHASVL

SEQ ID NO: 50928 - protein, 143 aa, Populus tremula
MISPSFTSPLFTLAVVLTVTITPLISASGGFCQEKMATLGGVHDSQSSQNSAEIDGLARFAIDEHNKKENAILEFARVVKAKEQVVAGTMHHLTIEAIEAGKKKLYEAKVWVKPWLNFKELHEFKDAGDVPVFTSSDLGVKRG

SEQ ID NO: 50929 - protein, 214 aa, Glycine max
MKVSIAKFHSLPLCFFLLLAFNTKPLLAAEPEPVVDKQGNPLEPGVGYYVWPLWADEGGLTLGQTRNKTCPLYVIRDPSFIGTPVSFLAPGLDHVPTLTDLTIDFPVVTVCNQPTVWRLNKVGSGFWFVSTSGDPNDITSKFKIERLEGDHAYEIYSFKFCPSVPGALCAPVGTFEDADGTKVMAVGDDIEPYYVRFQKVSIFGQDKKQPFSIL

SEQ ID NO: 50930 - protein, 217 aa, Triticum aestivum
  misc_feature (13)..(13): Xaa can be any naturally occurring amino acid
  unsure (1)..(217): unsure at all Xaa locations
TRPDDIAMALLEXEELGRPWQDIYSELSPSPIAAASLGQVYKGRLKDTGQLGGVKVQRPFVLETVTIDLFIIRNLGLVLKRFPQVALDVVGLVDEWAARFFEELDYVNEGENGTLFAEMMREDLPQVVVPRTYPEYTSRKVLTTGWVDGEKLSQSTEDDVGSLVNVGVICYLKQLLDTGFFHADPHPGNMIRTPDGKLCILDFGLVTKLTDDQKYGM

SEQ ID NO: 50931 - protein, 143 aa, Populus tremula
MISPSFISPLFTLAVVLTVTITPLISASGGFCQEKMATLGGVQDSQSSQNSAEIDGLARFAVDEHNKKENAILEFARVVKAKEQVFAGPMHHLTIEAIEAGKKKLYEAKVWVKPWLNFKESHEFKDAGDVPVFTSSDLGVKRG

SEQ ID NO: 50932 - protein, 611 aa, Oryza sativa
MDFKVASFLLLLLIVTCGAAQGQGNDFVVLDLKTTEIGEDASPMYKEQIASTKIPVTLLRSKHSSLCSACENITSEAVNFLSEKQIQDKIRTILHDTCSQTFSFEQKCLETMDSYATLVFAKIAEIKPAAFCKQYGLCRDMALLSAVKSESTCLFCHHIIDEITSKLKDPDAEFEIIQLLLKECNKIEGHQQQCKRMVLQYVPLVLVNGEKFLEKNDVCAMIQACDAGKRKALNLFSARKLILSAYFVVLPLRDEGAISLGLSTLPGLFAGSLLLTLVAAPVASLAFSLPSIPKPRALVFIHRFFSLSLLVFFVLWFASTPGHSPSISQVSLLNLIAISSTWARVIDVMDNESGSRLFGFIGAGATLGQLFGSLFAATMAWLGPCFWLIARSSYLMYISLFLWLSAVVSSFFYFQLHRWKDPPFTIHLHLPYFQKVTIVATTISSPTARRRTFALINSFIAVFILAGQLTLTGRILTVAGVTVAICASPFIATLNMVALALWPTWVAVAVTETIRKVTTYVLTRPGRELLFTVVSQDEKYKAKVCIDVVVQRLGDATAAGIYSLLFSSLEKKASMVTLYALPLCFVWLLTAFHLGRLQTNLVKVQVASFAS

SEQ ID NO: 50933 - protein, 306 aa, Ustilago maydis 521
MAQTKEDQQKHAYAATLQRLERIRNHLDTRPRSGRLAGKVAIITGCGSLSGIGRATALQFAHEGVKHIYVCDIDDENLPLLKETIAKRYPDVKCTAIASDAAEEASVTSIIDQAVADNGHLDIFFANAARATGAPITATDVEDLETTHHINVTSCFLACKYASQAMLKTHPKHKPEPSGSIIMTASVAGIRSGAGSVDYSASKAAVISLAQTTSWQLQRTNIRVNAVCPGLIETGMTMPTFEMARERGTAGKIGQLNPTARYGVAAEIANAVTFLASDEATYVNGVALPVDGGLQASLPVVPGKFH

SEQ ID NO: 50934 - protein, 387 aa, Geobacter metallireducens GS-15
MDLDRIKGEIVAFVEGRKSEFAAIAEDLYLHPETGLNEVRSSALLADFLEREGFRVERGIAGLPTAFRAETGEGGPVIAFMAEMDALPVMGHACGHNVIAAAAVGAATALRSILPPDAARIVVLGTPAEEMGIGKVDMIANGAFDGVEFALMVHPSSRRYVIKHYLGLARVRFTFFGKPAHAAAYPEEGINALDGVIQTFNGISALRQQLRQDVRVHGIITEGGVAPNIIPERASAHFYVRADDLAELERAKARVLACAEGAALATGCRLQVDADPRIMAPLKVNRIFSDLYSAQLAYLDLQESENQPDKNKGSSDIGNVSQIVPTIHPHVPIGDGINIHSEAFARATVSGKGKAAVAEGATALALTAAELAARPDIREEIWREFRS

SEQ ID NO: 50935 - protein, 143 aa, Populus tremula
MISPSFISPLFTLAVFLTVTITPLISASGGFCQEKMATLGGVHDSQSSQNSAEIDGLARFAVDEHNKKENAILEFARVVKAKEQVVAGTMHHLTIEAIEAGKKKLYEAKVWVKPWLNFKELHEFKDAGDVPVFTSSDLGVKRG

SEQ ID NO: 50936 - protein, 401 aa, Methylococcus capsulatus str. Bath
MVCPVGLNVPESWDSILNGRSGIGPIEHFDVSDFATRFGGSVRNFDVTRYLPEKEAKKMDTFIHYGMAAGSQAFEDSGLEVTESNADRVGVCVGSGIGGITGIEHGYGVFLKSGPRKISPFFVPANIINMISGNLSIKYGLKGPNYAIVTACATATHSIGSAARIIQYGDADVMLAGGAEMASSPTALGGFISARALSRRNDDPVRASRPWDKDRDGFVLGDGAGVVVLEELEHAKKRGARIYAELIGFGMSGDAHHMTQPPEDGDGAARCMMHAMRDAGVNPEDIDYVNAHGTSTPAGDLAETRAMKTVLGPHAYSTAISSTKSMTGHLLGAAGGIEAIFSVLAIRDRVVPPTINLDTPDPECDLDYVPHTAREKDLEVVMSNSFGFGGTNATLIFKKFR

SEQ ID NO: 50937 - protein, 226 aa, Chlamydia trachomatis D/UW-3/CX
MTLLILLRHGQSVWNQKNLFTGWVDIPLSQQGIQEAIAAGESIKHLPIDCIFTSTLVRSLITALLAMTNHSSQKVPYIVHEERPDMSRIHSQKEMEQMIPLFQSSALNERMYGELQGKNKQEVAAQFGEEQVKLWRRSYRIAPPQGESLFDTGQRTLPYFQERIFPLLQQGKNIFISAHGNSLRSLIMDLEKLSEEQVLSLELPTGQPIVYEWTGQKFTKHAPSLG

SEQ ID NO: 50938 - protein, 140 aa, Chloromonas sp. ANT3
FKVWQPVNNKQYETFSYLPALTTEQIAKQVDYVIRNGWTPCLEFADPSSSFVSNENTVRFRGASSNYYDNRYWTMWKLPMFGCTDASQVLKEIAACNAAFPESYSRLVAFDNNKQVQCMGFLVQRPKNATEYCPVDKRSV

SEQ ID NO: 50939 - protein, 165 aa, Triticum timopheevii subsp. armeniacum
VMASSATTVAPFQGLKSTAGLPVSRRSSGSLGRVSNGGRIRCMQVWPIEGIKKFETLSYLPPLSTEALLKQVDYLIRSKWVPCLEFSKVGFVFREHNSSPGYYDGRYWTMWKLPMFGCTDATQVLSEVEEVKKEYPDAYVRVIGFDNLRQVQCVSFIAFRPPGCE

SEQ ID NO: 50940 - protein, 280 aa, Arabidopsis thaliana
MEFENRYGLATSQKYDCLLFDLDDTLYPLSSGIARECGNNIKDYMTEKLGIPKDKIVELSDLLYKNYGTTMAGLRAIGYEFDYDEYHSFVHGRLPYDNIKPDLVLRSLLLSLPLRKVIFTNADRVHAAKALKKLGLEDCFEGIICFETLNLMHTNAASNNSEIFDIVGHFNRSEPVGSLPKTPVVCKPSESAIEKALEIANIDPNRTLFFEDSVRNVQAGKRVGLYTVLVGKSTKVKGADYALENIHNMKEAIPELWESDRKSSDVGYSGKVAVETSVRA

SEQ ID NO: 50941 - protein, 493 aa, Pseudomonas syringae pv. tomato str. DC3000
MFLGIDCGTQGTKVLVLNAESGKVLGEGSAPHSLISDHNGRREQDVQQWLDALQQATRDALAQAGVSGQQIQGIGVSGQQHGLVLLDAQGEVLRPAKLWCDTESAPENQRLLDYLGGAQGSLQRLGLVIAPGYTVSKLLWTKEQHPQVFERIDKVLLPHDYLNYWLTGRCCTEFGDASGTGYFNVRSREWDLPLLAHIDPSGRLGKALPQLLEADAPVGTLLPDIARLLGLNPDALVSSGGGDNMMGAIGTGNIQPGLITMSLGSSGTVYAYGDEVRVSEHESVATFCSSSGGWLPLICTMNLTNATTAIRELFALNIKDFNQAIAQAPIGAEGVLMLPFFNGERVPALPDATASIVGLDSTNLTQANLCRAVVEGTTFGLRYGLDLLRDSGIKSEKIRLIGGGSKSAVWRQIVADIMNTPVICTVQPEAAALGAAIQAAWCRSKADGTPEALLQLCERCVSLDPDSETHPVAQNVATYQQVYQRYQAQLRKV

SEQ ID NO: 50942 - protein, 875 aa, Listeria monocytogenes EGD-e
MTKTKVHVIPHSHWDREWYFTSSRSTIYLVKHLKEVIETLEAKEDYHFYLMDAQSSLIEDYLRYCPEDKSRLEKLIAEKRLITGPWYTQTDQLVISQESIVRNLLYGTRIAREMGHSMAVGYVPDAFGQGGNMPQIYKEFGISKFLFWRGVADNRLKQTEFIWRGDDGTEMLAEQIPFGYYYGANIPENEAELKTYLDEQIGALEEKASTPNVYFPNGLDQAPVRKNLPELVAKFNELDSTREYQIASPETFFADLEKDVTDLPVIAGELTEGKHSRLHKSIFSTRADLKQANNQIENFLSNVLEPVLSISYSLGNRYPHNELAEIWKLMFENAAHDSIGGCNSDTTNRDVKHRYKLASDLATNLLDLNMRLISEKIEQRQPFQFTVFNPLPYEKSGVIKMTAYIPEDNFTVEDTQGNTLEYTILEKTDLTEYVLNQHIDLNPSRPVYLPEKVFLATMLVNVNNLPALGYDTIYFNLEKETAEQEPTQSAATKIENEFYEIQLAANNSLTIHDKKAGRTYTDQMIFVENGDDGDSYNYSPPRKDLVISSKEAVVESIESSISSVNQALTISFKLNVPYNLEERANGEKNNEMIIKTVISLRKNEELIRFDVQIANQVLSHRLCVTFATEIASKFSTADQLFAPIKRPVRLPEMDVWEAEEWQEAPISIEAMQSFVSLHDESHGVAVMTEGVREYEIIGENYDTISLTLFRTFSHMGKTDLLYRPGRASGESIVATPDAQLLGEINATFALTLFESSFDEATIAKKAKEYLSNPQVYQMSDFLNGRLIYVYRDEEKTLDATYSLALPTIDGAIISAVKKAEDSDAFITRFFNPYLQKELIIPEVFQGKERHLDESKSNEKQTTLKHAKVQSYLFEK

SEQ ID NO: 50943 - protein, 122 aa, Brassica napus
LSYEDEFFGLEINSRNEIEDEEDEEEEEEEDRGGEMFPITTRSITGRNRILDWAEILMGIEDNSDRYAVNAADYVDDGAGYEALLQNLAEGDGGGRRGAPPAAKSAIEALETLEVGDSCDKM

SEQ ID NO: 50944 - protein, 493 aa, Nicotiana tabacum
MANKVVCPKAFRDLRSFVRCLNTAPTVPPMNFTGAYDATTVTTPALIPTDQVITADKKVINFEDVKELFTGVSTLKLIRSTLTLQMAATEPMVDVGIWVMNSKLMHMPIVKEVILGFVKGTFYEHFCAGKDLIEVRRTVTKLSDVGLKGMLDYGVEHATENESCDQSMKVFLQTAESTKSLPSSSVSFVVVKITAICTPKLLKRMSDLLRWEHKNPSFNLPWKQKSLPLFSDSSPFYHTPQKPEPLTVEEEHDLQLAHERLMTICKKCLELDVDLLIDAEDTAIQPAIDYFAYSAAIKYHKDDDPMIFGTIQAYLKDSKERMVIAKKAAEKMGVPMGFKLVRGAYMSSERELASRLGVQSPIHDSIEQTHDCFNSCAEFMLDEISNGSGAVVLATHNIDSGKLAASKAIDLGIRKDSQKLQFAQLYGMAEGLSFGLRNAGFQVSKYLPFGPVEQVMPYLIRRAEENRGLLSTSAFDRQLMRKELTRRFKVATS

SEQ ID NO: 50945 - protein, 489 aa, Persea americana
MEWPKSNDHSLLSKMATNDGHGEKSRIFDGWKAYDNDPYHPTTNPQGVIQMGLAENQLCFDLIEEWIKKNPKWSICTAEGASEFKDIALYQDYHGLPAFRSAIAKFMEKVRGGRAKFNPDRIVMSGGATGAHELVAFCLADPGDAFLVPTPYYPGFDRDLRWRTGVQLVPVVCYGKNDFKITRVALEEAYKKAQEDNIRVKGVIITNPSNPLGTVLDRETLRSIAKFVNEKNIHLVCDEIFAATVFNQPDFIGISEILEEEEEEDVQYNLDLFHVVYSLSKDLGFPGFRVGVVYSYNDDVMNCGRKMSSFGLVSTQTQYLIAGMLSDEVFVENFLAESHRRLAARHKFFTKDLDEVGIGCLNSNAGLYCWVDLRRLLKEATVAGEIALWRTIINEVKLNVSPGSSCHSSEPGWFRVCFANMDDETMKEAIKRIRKFVFENRLVGVASGKGPAVAAKSLGCASKLLRDLKIPYPRQCIMSPQSPLVQATT

SEQ ID NO: 50946 - protein, 424 aa, Avicennia marina
MDPYKYCPSSSFNTPHTTTNGGHPVYNDNSSLTVGTRGPVLLEDYQLIDKLAHFTRERIPERVVHARGATAKGFFEVTHDVSHLTCADFLRAPGVQTPLIVRFSTVIHERGSPETLRDPRGFAVKFYTREGNFDIVGNNFPVFFIRDAIKFPDVIHAFKPNPKSHIQESWRILDFCSHFPESLLTFAWFYDDVGIPQDYRHMEGFGVHSYTLINKAGKVNYVKFHWKPTCGVKCLMEDEAVRIGGTNHSHATQDLYDSIAAGNYPEWKLYFQIMDPDQEDRFDFDPLDTTKIWPEDIIPLIPVGRMVLNKNIDNFFAENEMLAFSPHMIVPGINFSNDKMLQTRIFAYGDTQRHRLGPNYLLLPVNAPKCAYHNNHYDGFMNFMHRDEEVDYFPSKYDPTRHAERHPIPNAVITGRRDRVRCFC

SEQ ID NO: 50947 - protein, 236 aa, SYNECHOCOCCUS SP. WH 8102
MLPSWLTQRGGESSTEAMHAVLGTPLRAPLMSDQEEALFACGCFWGAEKGFWRLPGVVSTAVGYAGGQRTNPTYQEVCTGTTGHTEVVRVVWSTPAVDFSDLLKLFWECHDPTQGNRQGNDTGTQYRSAIYTTTNQQMSLAQASRTSYQDALNQRGYGPITTEILADQAFTFAEPYHQQYLAKPGSRPYCSAMPTQTVLGDFDGNNYRLPSTVWAAYDWSINHCVLRSDNAPIRMA

SEQ ID NO: 50948 - protein, 473 aa, Pseudomonas fluorescens PfO-1
MPVGNHPPHGETAQGGPLKRELGERHIRLMALGACIGVGLFLGSAKAIEMAGPAIMLSYIIGGLAILVIMRALGEMAVHNPVAGSFSRYAQDYLGPLAGFLTGWNYWFLWLVTCVAEITAVAVYMGIWFPDVPRWIWALAALVSMGSINLIAVKAFGEFEFWFALIKIVTIIAMVLGGIGIIAFGFGNDGVALGISNLWAHGGFMPNGVTGVLMSLQMVMFAYLGVEMIGLTAGEAKNPQKTIPNAIGSVFWRILLFYVGALFVILSIYPWNEIGTQGSPFVMTFERLGIKTAAGIINFVVITAALSSCNGGIFSTGRMLYSLAQNGQAPAGFARTSSNGVPRRALLLSIFALLLGVLLNYLVPEKVFVWVTSIATFGAIWTWVMILLAQLKFRKGLSASERAGLKYKMWLFPVSSYLALAFLVLVVGLMAYFPDTRVALYVGPAFLVLLTVLFYVFKLQPKDSVQGAMRSAS

SEQ ID NO: 50949 - protein, 483 aa, Persea americana
MGFLRNQQLLSKMATGNGHGENSPFEGWKAYDSNPYHAIKNPDGVIQMGLAENQLSFDLVEDWIKENPESSICTLKGVSQFKDIALFQDYHGLSAFRNAVANFMGKVRGGKVKFNPDRIVMSGGATGAHETMAFCLANPGDAFLVPTPYYAGFDRDLRWRTGVQLIPVVCESSNGFKVTRDALEIAYKKAQEDNIKVKGVLITNPSNPLGTILDRETLKSIVSFINEQNIHLICDEIYAATVFSQPDFISISEILEEGITCNLDLIHVVYSLSKDLGFPGFRVGVIYSYNDDVVNCAREMSSLGLVSTQTQHLLSAMLSDEQFVDKLISESAERLASRHKMFTIELGKVGISCLKSNAGLFCWMDLRALLEKKTVEGEMALWRTIIEKVKLNVSPGSSFHCSEPGWFRVCFANMDDETMKVALDRIIDFVFKPNKKEIMAPKKVQQKWQANLHLRLSLCGRRHEEVTKTPCTMSPHSPLVRAT

SEQ ID NO: 50950 - protein, 165 aa, Triticum aestivum
VMASSATTVAPFQGLKSTAGLPVSRRSSGSLGRVSNGGRIRCMQVWPIEGIKKFETLSYLPPLSTEALLKQVDYLIRSKWVPCLEFSKVGFVFREHNSSPGYYDGRYWTMWKLPMFGCTDATQVLNEVEEVKKEYPDAYVRVIGFDNLRQVQCVSFIAFRPPGCE

SEQ ID NO: 50951 - protein, 189 aa, Kluyveromyces lactis NRRL Y-1140
MANLRTQKRLAASVAGVGKRKIWMDPSETAEIAQANSRNAIRKLVKNGTIVKKPTRIHSRSRTRAMAESKRNGRHTGYGKRKGTKEARLPSQVVWIRRLRVLRRLLAKYRDAGKIDRHLYHSLYKSAKGNTFKHKRALVEHIIQAKADAQREKALKEEAEARRSKNRAARERRAQRVAEKREALLKEDA

SEQ ID NO: 50952 - protein, 635 aa, Persea americana
MKGCDCIEPQWSSDDLLVKYQYLSDFFIAVAYFSIPLELVYFVQKSAFFPYRWVLTQFGAFIILCGATHFISLWTFTIHSKTVILVMAVAKVSTAVVSCATALMLVHIIPDLLSVKTREMFLKNKAEELDREMVIIRAQEETGRHVRMLTHEIRSTLNRDTILKTTLVELGRTLGLEECALWMPSHNGSSLQLSLTLRYPISVGATVSIQLPIVNKVFNSIHAVIIPHSCPLARIRPLSGKYVPPEVAAVRVPLLYLSNSQVNNWPELSANGYAVMVLMLPSDSARKWHVHELELVEVVADQVAVALSHASILEESMRAQDMLTEQNAALDLARQEAERAICARNDFLAVMNHEMRTPVHAIIALSSLLLETELTPEQRVMVETVLKSSNLLETLINDVLDLSRLEDGSLKLDIGIFNLHAVFREVINLIKPIAAMKKLSLSLMVAPNVPAFAVGDERRLMQIILNVAGNAVKFTKEGQVSVMACVEKQESLADPQALESYPASSDSHFHLRVQIKDSGCRVSPQDIPHLFTKFCICTRSGVNRSQDGSGLGLAICKRFVNLMEGHIWLQSEGLGKGCTATIVVKLGNNGNKTEESTQVVPRAHPKCGVENLSSRNPFLTISSRTQILKKCLLDF

SEQ ID NO: 50953 - protein, 165 aa, Secale cereale
MMASSATTVAPFQGLKSTAGLPVSRRSSGSLGNVSNGGRIRCMQVWPIEGIKKFETLSYLPPLSTEALLKQVDYLIRSKWVPCLEFSKVGFVFREHNSSPGYYDGRYWTMWKLPMFGCTDATQVLNEVEEVKKEYPDAYVRVIGFDNLRQVQCVSFIAFRPPGCE

SEQ ID NO: 50954 - protein, 100 aa, Persea americana
PLLGGVRDVPDHNSAETEELARFAVQEHNKKANTRLEFSRVVKAKEQVVAGTMYYITLEVVEAGQKKIYEAKVWVKLWENFKELQEFKPVGDSSSTSSDA

SEQ ID NO: 50955 - protein, 237 aa, Zea mays
MAGADVDVGTELRLGLPGGGADAAKAAKRGFEDTIDLKLKLPTAGMEEAAAAAAAKPEPAAEKAKRPAEAPAADAEKPPAPKAQAAVGWPPVRSYRRNAMTVVQAVRSKKEEEPEKQQQPAAANAFVKVSMDGAPYLRKVDLKTYGSYKDLSAALKKMFGTFVTATGNSMNEGRLVDPAGDADDVVTTYEDKDGDWMLVGDVPWEMFVDSCKRLRIMKSSEAIGLAPRTKDKCKNKS

SEQ ID NO: 50956 - protein, 491 aa, Arabidopsis thaliana
MGSKLKLYPLLNHSSVFHPDSRYQSAPTMEEEQQQLRVLFAKYEMGRLLGKGTFGKVYYGKEITTGESVAIKIINKDQVKREGMMEQIKREISIMRLVRHPNIVELKEVMATKTKIFFIMEYVKGGELFSKIVKGKLKEDSARKYFQQLISAVDFCHSRGVSHRDLKPENLLVDENGDLKVSDFGLSALPEQILQDGLLHTQCGTPAYVAPEVLRKKGYDGAKGDIWSCGIILYVLLAGFLPFQDENLMKMYRKIFKSEFEYPPWFSPESKRLISKLLVVDPNKRISIPAIMRTPWFRKNINSPIEFKIDELEIQNVEDETPTTTATTATTATTTTTPVSPKFFNAFEFISSMSSGFDLSSLFESKRKLRSMFTSRWSASEIMGKLEGIGKEMNMKVKRTKDFKVKLFGKTEGRKGQIAVTAEVFEVAPEVAVVELCKSAGDTLEYNRLYEEHVRPALEEIVWSWHGDNHNNNIVKSNGNYVSDENSGSDC

SEQ ID NO: 50957 - protein, 214 aa, Triticum aestivum
  misc_feature (198)..(198): Xaa can be any naturally occurring amino acid
  unsure (1)..(214): unsure at all Xaa locations
AYLGDSLEQVCTKKQAGTGPEFPGYRRPTRPKEIPALIVWTLGGKNVSVEGSWDNWKSRKPMQKSGKDHSLLLILPSGVYRYRFVVDGERRCFPDLPCETDAMGNAVNLLDVHDFVPESVESVSEFEAPPSPESSYSFQSPEEKDFAKEPPALSSQLHLGVLNSQNSEEICARPQHIVLNHLFIEKGWGAHPLVALGXTHRFESKYVTVVLFNP

SEQ ID NO: 50958 - protein, 234 aa, Arabidopsis thaliana
MLGIFSGAIVSPPEELVAAGSRTPSPKTTGSTLVNRFVEKNPSAVSVQVGDYVQLAYSHHNESPLRPRSFGAKDEIFCLFQGSLDNLGSLKQQYGLAKNANEVLLVIEAYKTLRDRAPYPANHVVAHLSGDFAFVVFDKSTSTLFVASDQVGKVPLYWGITADGYVAFADDVDLLKGACGKSLASFPQGCYYSTALGGLRSFENPKNKITAVPANEGEIWGATFKVEGATVLAD

SEQ ID NO: 50959 - protein, 551 aa, Lactobacillus johnsonii NCC 533
MRHWYDQAIIYQIYPKSFQDSNNDGIGDLNGIRKRIPYLKELGINAVWLNPIFVSPQVDNGYDVSNYFAIDPKMGTMEDMDNLIKEMHEAGIHVIMDFVLNHTSDQHPWFQDAIKNPESIYRDYYIFAGENNQRPNNWGSFFGGSVWEKDPAGTGQFYFHLFDKRMPDLNWKNPEVRHAMTEIAKYWLEKGIDGLRLDAFIHIAKADLRQNFPVNSKDEEPVIAEPFFANLPQVQKWMRLFCEEIKQDYPDALLLGEAASANVNLAVDYTNKNNHLMDSVITFRYFTEDQSKIDPSFLSNYQPKPLDWVKFKQNQTIWQQTLSGISKPTLYWNNHDMARLATRIAKNDIQARSLAMLMYLQCGIPIIYYGEELGMKNLQFEDINDFKDDTVKEFVTSAEKAGKTSKEALLMASKTHKLPARGPMPWDNERNNGFTEKEPWIKGRKLDKVNVADEIADDSSMFNFYKKLISLKKEQLFQEGNYYLWPTSNGSYVYERNLKDKKALIAVSLSQEPIELEVGKEFSNERLSAGQYDLVAGKLRLEPYAGVVLEN

SEQ ID NO: 50960 - protein, 574 aa, Lactobacillus johnsonii NCC 533
MQLAALKHRTESENCFVIDHSHVKIRLHTAKDDVEKVIVHYTDNYLPPKQAKELEMEKIGSGQVNDYWGATLTAPYHRIKYTFEVIGKDGSHVIFGDRSIEKFSDKKLREDGMYFKVPYFHDIDRIKTPKWLKDIVWYQIFPERFANGDKSNDPANVKEWNPEDHPGREDFYGGDLQGVLDHLDDLQKLGVTGLYFCPIFKASSNHKYDTIDYLQVDPAFGDKDLFAKVVNEAHKRGMKVMLDAVFNHLGDQSMQWQDVVKNGEKSRFKDWFHINSYPVEPYRDPSKGENNPPYETFAFEKHMPKLNTANPEVQDFLLEIATYWVKYFDIDAWRLDVANEVDHHFWKRFHDELVKIKPDFYIAGEIWHSARPWLQGDQFTGVMNYPYTLQIEDHFFKHKMDAKDLSEHLTDQLMMYPDMVDQAMMNMLDSHDTARILTLAKDNQDLALQAVAYEFVQPGVPCIYYGTEMGMSGDNDPDCRKPMDWSKINGPVWQRVHELVKFRLDHSDTLNKGTVKLTVTEKGLLKVERTGKETIKAYYNTGKHNVKIDKTAALSQNYKAGVLAPNGFLIEVKA

SEQ ID NO: 50961 - protein, 362 aa, Ustilago maydis 521
MADEIQCTGPVDNGSGSIGLRIGAIFIIWASSTALTLFPIVTRRIPRLSINREAFDFAKYFGSGVIIATAFIHLLAPAASDEELGSPCLSSDFQNYPFAFAFAMIAMFAVFVVEVLAFRVGSQYANKLAYDSHAGGHHHAMEHGGNPNLAQEEQHNHNAIKSVSSDDVENAAAVPGADSAAEAKMVADSSSTASTKLDLTTQASEILGVMILEFGVVFHSIIIGITLGTTSDFTVLFIVIIFHQMFEGLGLGTRLAFLPLGMKSWIPTLGAILYGLVTPIGIAIGLGVRHTYNGDSATAAYVTGIFDSVSAGILLYTGTVELLAHEFIFNDKMRNAPLKKVVISILEMLTGAGLMALLGRWA

SEQ ID NO: 50962 - protein, 143 aa, Populus tremula
MISPSFISPLFTLAVVLTVTITPLISASGGFCQEKMATLGGVHDSQSSQNSAEIDGLARFAVDEHNKKENAILEFARVVKAKEQVVAGTMHHLTIEAIEVGKKKLYEAKVWVKPWLNFKELHEFKDASDVPVFTSSDLGVKRG

SEQ ID NO: 50963 - protein, 538 aa, Bacillus cereus ATCC 14579
MLTKGLVDNFSLSSISAGQIVGLVAFFVMQTIAAGLSIYLLNYIGQKIVAGLRERLWKKVLILPVSYSDQNRTGDTITRMTNDTGVVKTLISEHLSNLLTAGISIVGSLIVLFVLDWKMTALLLTVIPLSVLILVPLGRKMYKISKALQDETASFTSVLTQVLSEIRLVKSSNTEKREYETGNTGIQKLLQFGLKEGKVQALISPVMSFVLMALLVIIVGYGGMRVSSGALTTGELVAFILYLVQIVMPMSQLSMFFTQFQKAIGATERISTILEYEVEDHETGVKVTNAKQPIVLENVHFEYNEEEQVLKNIDFTIESGKVTAIVGPSGSGKTTLFSLLERFYEPTSGAIKLGEESITSYSLESWRRQIGYVSQDSPLIDGTIRDNICYGVEGEVTDEEIEKVAAMAYVDAFIHDLPNGYATEVGERGVKLSGGQRQRIAIARALLRNPQILMLDEATSSLDSKSESVVQKALNNLMKGRTTLVIAHRLSTVVDADKIIFIEKGNLTGSGTHDELLQTHDMYREFATQQLKIKEGAL

SEQ ID NO: 50964 - protein, 143 aa, Populus tremula
MISPSFISPLFTLAVVLTVTITPLISASGGFCQEKMATLGGVHDSQSSQNSAEIDGLARFAVDEHNKKENAILEFARLVKAKEQVVAGTMHHLTVEAIEAGKKKLYEAKVWVKPWLNFKELHEFKDASDVPVFTSSDLGVKRG

SEQ ID NO: 50965 - protein, 166 aa, Brassica napus
KAREEVKQVFGHKIPDTDGLNQLKVMTMILYEVLRLYPPVTQVSRAIHKEMKLGDLTLPGGVQISLPILLVQRDTELWGDDAGEFKPERFREGLSKATKSQVSFFPFAWGPRICIGQNFALLEAKMAMALILQRFSFELSPSYVHAPYTVITIHPQFGAHLILHKL

SEQ ID NO: 50966 - protein, 509 aa, Geobacter metallireducens GS-15
MELPLCDFPFTLQLDLQKTTKESSEMMILKNSSLLKQQCYLDGHWCCADGGATIDVTNPATGEILGVVPKMGTQETRRAIEAANGALDGWKARTAKERSAILRRWFELIMENLEDLAVIMTAEQGKPLAESRGEIAYAASFIEWFAEEGKRIYGDTIPSYARDKRIVVIKEPIGVCAAITPWNFPAAMITRKAGPALAAGCTMVVKPATATPFSALALALIGEQAGIPAGVFSVITGSSKEIGDEMTGNPIVRKLTFTGSTEVGKQLTAQCAGTMKKVSMELGGNAPFIVFDDADLDAAVEGAIASKYRNTGQTCVCTNRILVQESVYEAFSAKLVAAVSKMTVGDGLKGEVQQGPLIDMTALEKVEEHIADAVAKGARVVLGGKRHALGGTFFEPTIITDVTPGMLVAREETFGPLAPLFKFSTDEEAIRMANDTEFGLASYFYSRDIRRVWKVSEALEYGMVGINTGLISSEVAPFGGVKESGVGREGSKYGIEEFVEVKYLCMGGI

SEQ ID NO: 50967 - protein, 218 aa, Zea mays
MAEETDTRPASAGSRGRPAPEDDDREEGEITDLACAPSPPATHPLEHSWTFWFDNPQSKSKQAAWGSSIRPIHTFSTVEEFWGLYNNINHPSKLIVGADFHCFKNKIEPKWEDPICANGGKWTISCGRGKSDTFWLHTLLAMIGEQFDYGDEICGAVVSVRGKQERIAIWTKNAANEAAQVSIGKQWKELLDYKDSIGFIVHDDAKKMDKGLKNRYTV

SEQ ID NO: 50968 - protein, 128 aa, Brassica napus
  misc_feature (8)..(8): Xaa can be any naturally occurring amino acid
  misc_feature (54)..(54): Xaa can be any naturally occurring amino acid
  misc_feature (125)..(125): Xaa can be any naturally occurring amino acid
  unsure (1)..(128): unsure at all Xaa locations
MASLQVTXTSAFTEWNELKFEGLYLFHTPLGSGANQARVIDNKAPIGIGATVVXNWTVYDGPGPNAKLVARAQGLHIQAGNWVNSFSLVFVDQRFSGSTLEVTGIVVESGEWAIVGGTGQFAMAXGVI

SEQ ID NO: 50969 - protein, 316 aa, Campylobacter jejuni RM1221
MYKFLSHEPLANKSCHHNHEEHSHEHHHSHADARSVDKKILKISLLMTFSMMLVQFIYSILSNSLALLSDTLHMFSDVFALALSFLAIIAVEKWQDHQKTFGYFRLEVLVAFINALTIILSALFIIYEAIEKFINPKEIDAKTMIIVAILGFLVNGINALMMFKGANLENVNMKSAFLHMMSDLLGSLAVIIGGIVVYFSGIVYIDTILAIVLSILLLRWAIILLKQSANVLLESSPVDIEKVRQVLLLNPSVDEVVDLHITQITNKMLVASMHLKVRVCNLKEFEKLSQDLSHKLLHEFEIGHITIQPIRSENEI

SEQ ID NO: 50970 - protein, 413 aa, Caulobacter crescentus CB15
MPATQKVISAQLDRDYPALEALYKDIHAHPELGFQEVETAKKLAAQMRALGFTVTEGVGKTGVVAVLKNGEGPKVLIRTELDGLPMQEKSGLAWASQATATWNGEKVFVAHACGHDIHMAAWVGAARQLVAMKAKWKGTLVFVAQPSEETVRGARAMLDDGLWDKIGGKPDYGFALHVGSGPAGEVYYKAGVLTSTSDGLDITFNGRGGHGSMPSATIDPVLMAARFTVDVQSVISREKDPSAFGVVTVGSIQAGSAGNIIPDKARVRGTIRTQDNAVREKILDGVRRTVKAVTDMAGAPPADLKLTPGGKMVVNDAALTDRTAVVFKAAFGARAVAQDKPGSASEDYSEFVLAGVPSVYFAIGGSDPAELAKAKAEGREPPVNHSPYFAPVAEPTIRTGVEAMTLAVLNVLK

SEQ ID NO: 50971 - protein, 387 aa, Oryza sativa
  misc_feature (149)..(149): Xaa can be any naturally occurring amino acid
  unsure (1)..(387): unsure at all Xaa locations
MLSSSPSAAAPGIGGYQPQRGAAVFTAAQWAELEQQALIYKYLVAGVPVPGDLLLPIRPHSSAAATYSFANPAAAPFYHHHHHPSLSYYAYYGKKLDPEPWRCRRTDGKKWRCSKEAHPDSKYCERHMHRGRNRSRKPVESKTAAPAGXGTPQLSNVTTATHDTDAPLPSLTVGAKTHGLSLGGAGSSQFHVDAPSYGSKYSLGAKADVGELSFFSGASGNTRGFTIDSPTDSSWHSLPSSVPPYPMSKPRDSGLLPGAYSYSHLEPSQELGQVTIASLSQEQERRSFGGGAGGMLGNVKHENQPLRPFFDEWPGRRDSWSEMDEERSNQTSFSTTQLSISIPMPRCGSPLGPRRPRGGPLPRILPLLVSWISDCASPGSLFNCIVL

SEQ ID NO: 50972 - protein, 165 aa, Hordeum vulgare subsp. vulgare
VMASSATTVAPFQGLKSTAGLPVSRRSSASLGSVSNGGRIRCMQVWPIEGIKKFETLSYLPPLTTEALLKQVDYLIRSKWVPCLEFSKVGFVFREHNSSPGYYDGRYWTMWKLPMFGCTDATQVLNEVEEVKKEYPDAYVRIIGFDNLRQVQCVSFIAFRPPGCE

SEQ ID NO: 50973 - protein, 470 aa, Leifsonia xyli subsp. xyli str. CTCB07
MMSWHPSGSLAVLTADEIPSLQRRRLLRRITVLSTFGGLLFGYDTGVISGALPFMRFEGVALSPFEEGVVVSSLLFGAAAGSLVGGRIADRSGRRRLLIGLAIVFFAAALGCTFAPSIAVMVAARVLLGIAVGAASVAVPLFLTEVSPAQRRGQIVTHNELMIVSGQLAAFTVNAAIAAAVPEHAEVWRWMLVVASLPAVVLFFGMLVVPESPRWLILQGRFAEGRAEHQAEREAAEIRDAIEHAPSASFADLVRALGTPWIRRVFLVGVGIAMVQQLTGVNSIMYYGVQILQRAGFDAQAALVGQIANGVISVLATFGGIWLLGRVGRRPLLITGLIGTTSALLLVGTSSAVLAGTPALPFATLTLTVLFLTFQQGAVSPVTWLMLAEIFPARIRGVAFGAAALVLWLTNFLVGFLFPQLVSGMGISPTFFVFAAVGCGALLFVVRALPETRGRSLETLERELEAHYTR

SEQ ID NO: 50974 - protein, 602 aa, Gluconobacter oxydans 621H
MTFPSRSRGGLTRRRFVTGLGAGSLLASLPRTSHAFSSKASSGIIPPMPSDRWDLKIGHTRISLDGKTMHAPTAGGTVPGPILRWKQGDTVSINVTNTLNEPTSIHWHGIRTPSNMDGVPGMSFGGIAPGETFTYRFKLHQSGTYWYHSHSGMQEAMGLYGALVIDPRRPDPNACDRDYVIFLGEWTDVMPDDIVSNLKMQDDYYVFRQRTAASFPKEAREAGSAGAALADRLAWSKMRMAATDIADVSGAIYTYTLNGHAPDMNWSGLFRPGEKVRLRFINGSTMTFFDVRIPGLEMLVVQADGNDIEPVPVDEFRIGVAETYDVIVQPKDERAYAIFAQSEDRTGYARGTLAPREGMIAPLPPMDPRPVRTMVDMGMGNMKPGESMKDMDMSGDMSGMKMDGDMAGMDMHGMDMKGMDMSHMAMPKMEVDDPGPPPINVENQMRAMMPIDRTGSPGDGLENNGRRVLNYKQLRATRPGADLRPPTREIILHLTGNMERYIWGMNGRKFSESGPIRLKLGERVRFTLINDTMMEHPIHLHGLWSELENGQGDYRPYKHTIISQPGSKLSYLVTADTPGMWAYHCHLMYHMDLGMFRTVIVA

SEQ ID NO: 50975 - protein, 442 aa, Lactococcus lactis subsp. lactis Il1403
MISFVQTGNGIVDFILTLIFLVLITYPILGGFAWFIGVLCYSFLFKYKQKNWDDIPVEVEPFVTIMVPAHNEEIVIEDTLNYLMTKINYENYEVLVTDDGSTDRTPEILKELQEKYDKLRVIRIEKNKGKAHAFNIGLGFAKGELVLSNDADTVPEPDSLNRYINYFIRQDSTNISAVTANMDVQNRAKLIAKSQTVEFSSIVGIIKRTQLGVLGSIYAYSGANTMYRKDALIDVGLFRQDRATEDISIAWDHQMDGWLSLFAPRIMFFMEVPESLKMLYRQRKRWAKGGTEVWLTNFKKVFLHPFDNVGRTIMFIDQSFSIIWSFFFWISSVIFIWSLFQFAITGNLERIYHMLTMAFLFVCFEMISGTFQLVASLIVDDRGRKVKYLLFAPLYMLFYWVMNALTIVTTFIPAVKTILGLGSGTWKSPERKGIKVTNKKDN

SEQ ID NO: 50976 - protein, 222 aa, Nostoc sp. PCC 7120
MALFGFGKKLALPTPEKALPGRAQIMPVPANHYVNKNPLKPPFPDGFEKALFGLGCFWGAERKFWQQQGVYSTAVGYAAGFTPNPTYDEVCTGLTGHNEVVLVVFDPKVISYTQLLKVFWESHNPTQGMRQGNDVGTQYRSGIYVYSEAQKQLAEASRDAYQQALSSAGYEKITTEILDAPEFYYAEAYHQQYLAKNPNGYCGLGGTNVACPVGVFESSANG

SEQ ID NO: 50977 - protein, 489 aa, Mannheimia succiniciproducens MBEL55E
MKKTSFTLTAIALGLSVLAAPTVSVADFSSFFGGDKSESAEQTSANKAASNVAQSAVNSPFITNSLAPMLEKVLPAVVSIAVEGNQKIAKRSFDIPEEFKFFFGEDFFGDNSSKSSSRKFRGLGSGVIINAEKGYVLTNNHVIDNADKITVLLQDGREFKGKILGKDSQSDIALVQLENPKNLTEIKFADSDKLRVGDFTVAIGNPFGLGQTVTSGIISALGRSTGSDSGAYENYIQTDAAVNQGNSGGPLINLNGELIGINTAILSPSGANAGIAFAIPSNMANNLAQQIGEFGEVRRGMLGIKGGELNADLAKAFHVDAQQGAFVSEVLPGSAADKAGIKAGDVIIAMNGQKVSSFAEMRAKIATSGAGKEIELTYLRDNKKENVKVTLQADDQAQSTANAEAVIPALEGAELTNFNENGKKGVKLSKVAENSPAAQRGLKTGDLIIGVNRIAIEDLTQLRKAMENKDSVIALNIERGNNNFYLLIQ

SEQ ID NO: 50978 - protein, 443 aa, Thermococcus kodakarensis KOD1
MTPEEVVERYSQVISRASHVTYVPIVPSRAENALVWDIEGRAYIDFLADAAVQNVGHNNPRVVEAVKKTADRLLHFTFIYGFPVEPLLLAEKLREIAPLEGAKVAFGLSGSDANDGAIKFARAYTGRRSIIGYLRSYYGSTYGAMSVTGLDFEVRSKVGQLSDVHFIPFPNCYRCPFGKEPGKCRMECVSFLKEKFEGEVHAEGTAALIAEAIQGDAGMVVPPENYFKKLKRILDEHGILLVVDEVQSGLGRTGKWFAIEHFGVEPEIITLAKPLGGGLPISAIVGRGEIMDSLPPLGHAFTMSGNPVASAAALAVIEEIEEKELLKRAQILGERAKRRLEKMKKKHELIGDVRGLGLMLGVDLVKDRETKERAYDEAKKVVWRAYELGLIVAFLQGNVLRIEPPLTIEEEVLDEGLDKLEEAIEDVEEGRVPDEVIEKVQGW

SEQ ID NO: 50979 - protein, 165 aa, Avena sativa
VTASSATSVAPFQGLKSTAGLPVGRRSNAGLGNVSNGGRIRCMQVWPIEGIKKFETLSYLPPLSEEALLKQIDFLIRSKWVPCLEFSKVGFIFREHGSTPGYYDGRYWTMWKLPMFGCTDASQVIKEVEEVKKEYPDAYVRIIGFDNIRQVQCVSFIAFKPPGCE

SEQ ID NO: 50980 - protein, 433 aa, Thermococcus kodakarensis KOD1
MENVEVVEKPVLKVGIEEKVEPAKAFVFGLQHVLAMFGATVTVPLVVGGAVGLSGDQIAMMIQAVLLAMGIATLLQTIIGTRYPIVQGSSFAFIPGLISIGSTIGMAAVQGALIVGGLIEGLVGWLGIIGKVRKLFTPLVTGVTITLIGFSLANVALMNFFNAYADPNGTNVWKAVLVATVTFLTTVFVALKAKGSLKAMPVVVGAAVGYLISIPLGLTNFSLIESLPMLSIPKPFPWGAPVFDTAAIAILLFAFMVSIIESVGDYHAIATVTGAEITEKHIGRGIGTEGLACSIAGFLGACGTTSYSENIGVVALTKVGSRHVVQVGAIILIFLSLFPKFAGLLASMPAPVLGGLTLALYGMISVTGLRLIKEKVEFTDRNVLILAAALIAGLGAPQLPESLFHALPRILSSILESGMAVGAITAIILERIL

SEQ ID NO: 50981 - protein, 217 aa, Thermococcus kodakarensis KOD1
MMKMPARVVGEEKVKLKKSFIKPWMGIKYLFKKPVTIKIPYEKIEPAPKYRGFHTLDWKKCVGCNFCGQICPARAIEMTWIEVNGHIATRPHPKVDYGRCTFCQFCVDVCPTGALGFSENYYLTTGGLEEDLELYDWVPIHPDKVRELNEKFNDYRFPVERIKFNKETREVTYYLRDGSTIQFKILGYGLRPPKPPAKPAAKPAEKKEGPKAEEKKE

SEQ ID NO: 50982 - protein, 165 aa, Aegilops speltoides
VMASSATTVAPFQGLKSTAGLPVSRRSSASLGSVSNGGRIRCMQVWPIEGIKKFETLSYLPPLSTEALLKQVDYLIRSKWVPCLEFSKVGFVFREHNSSPGYYDGRYWTMWKLPMFGCTDATQVLSEVEEVKKEYPDAYVRVIGFDNLRQVQCVSFIAFRPPGCE

SEQ ID NO: 50983 - protein, 275 aa, Myxococcus xanthus
MLGGTAVVMTVDAYGPISDNAGGISEMSGLGPEVRAITDELDAVGNTTAAIGKGFAIGSATLTVIALFSAFNLEVNHTRIAAGLPEMSLQLTNPNVIVGLLLGSILPFLVGASTMLAVGRAAGAIVEEIGRQFREIPGLMELKADPDPKKIVDIATKSALQEMVFPGIIAVAAPPLVGYLLGPGALAGLLAGSLVVGATMALYMANAGGAWDNAKKFIEKGKLPGHAKGSAVHKAAVVGDMVGDPFKDTSGPGVAILIKVMSVVSLLVASLIALR

SEQ ID NO: 50984 - protein, 467 aa, Exiguobacterium sp. 255-15
MQLKREMTSRHLFMISLGGIIGTGLFLGSGLTISQAGPLGAVLSYIVGGTIMYLTMLCLGEMAVHMPVSGSFQTYTTRFIGPGIGFAVGWIYWLGWAVTVALEITAAGSLMDRWFPNTPIVIWCAIFTVILFGLNAVSAKAFGEAEFWFSSLKVLAILFFIALGGAAWFGWIDMTAARPESLFANFTSNGLFPNGALGVLTTMIAVNFAFQGTELIGVAAGESNDPEKSIPKAIRNTVWRTFIFFVLSITIVGALIPYETAGGISSPFIMVFDAIGIPYAADLMNIVVLTALLSVGNSGLYAATRMLWSMSQEGMISKKLAIVNSRGVPMRALCFTMLFAMLSLLTAFFAEDTVFIWLLSLAGLGAQVGWISISASQIAFRRQFIKNGHTVSELKFKTPFFPVLPIISFSLNMLVLISLAFQADQRIALYIGVPFFLLTWGCYHLFVKGKHIAAQTERQAASSTLES

SEQ ID NO: 50985 - protein, 154 aa, Aegilops speltoides
VMASSATTVAPFQGLKSTAGLPVGRRSSGSLGSVSNGGRIRCMQVWPIEGIKKFETLSYLPPLSTEALLKQVDYLIRSKWVPCLEFSKVGFVFREHNSSPGYYDGRYWTMWKLPMFGCTDATQVLSEVEEVKKEYPDAYVRVIGFDNLRQVQCV

SEQ ID NO: 50986 - protein, 312 aa, Glycine max
  misc_feature (105)..(105): Xaa can be any naturally occurring amino acid
  misc_feature (180)..(180): Xaa can be any naturally occurring amino acid
  misc_feature (187)..(187): Xaa can be any naturally occurring amino acid
  unsure (1)..(312): unsure at all Xaa locations
MATATNAAAAPPRQLSQKEADIQMMLAADVHLGTKNCDFQMERYIFKRRNDGIYIINLGKTWEKLQLAARVIVAIENPQDIIVQSARPYGQRAVLKFAQYTGAHXAIAGRHTPGTFTNQLQTSFSEPRLLILTDPRTDHQPIKEAALGNIPTIAFCDTDSPMRYVDIGIPANNKGQHSIXCLFWLLXTMVLQMRGTIRPGLKWDVKVDLFFYREPEEAKHQKEEEAPAGDYAIPDFNAGAIAADGQWPGPIDQSWSDAVPQPIPAAPGVNWGAPAKAPAAVAKGDWGETVPPPQQIPVPPSGIDSVQPTGWE

SEQ ID NO: 50987 - protein, 454 aa, Oryza sativa (japonica cultivar-group)
MSTTKVKRRVGKYELGRTIGEGTFAKVKFARDTETGDPVAIKILDKEKVLKHKMVEQIKREISTMKLIKHPNVVRIYEVMGSKTNIYIVLEYVTGGELFDTIVNHGRMREDEARRYFQQLINAVDYCHSRGVYHRDLKPENLLLDSYGNLKVSDFGLSALSQQIKDDGLLHTTCGTPNYVAPEVLEDQGYDGAMADLWSCGVILFVLLAGYLPFEDSNLMTLYKKISNAEFTFPPWTSFPAKRLLTRILDPNPMTRITIPEILEDEWFKKGYKRPEFDEKYDTTLDDVDAVFNDSEEHHVTEKKEEPEALNAFELISMSAGLNLGNLFDSEQEFKRETRFTSKCPPKEIVRKIEEAAKPLGFDVQKKNYKICSPCLTTICMNIPFKLRLEKVKAGRKGNLNVATEILQVAPSLHMVEVRKAKGDTLEFHKFYKNLSRTLKDVVWKSDDLQNQLS

SEQ ID NO: 50988 - protein, 412 aa, Salmonella enterica subsp. enterica serovar Typhi Ty2
MKALTYHGPHHVKVENVPDPGIEQPDDIILRVTATAICGSDLHLYRGKIPQVKHGDIFGHEFMGEVVETGHDVKNIRKGDRVVIPFVIACGDCFFCRLQQYSACENTNDGHGAAMNKKQIPPPAALFGYSHLYGGVPGGQAEYVRVPKGNVGPFKVPPLLSDDKALFLSDILPTAWQAAKNAQIQQRSSVAVFGAGPVGLLTIACARLLGAEQIFVVDHHAWRLRFAEERYGAIPINFDDENDPAEKIIEQTAGHRGVDAVIDAVGFEAKGSMTETVLTNLKLEGSSGKALRQCIAAVGRGGVVSVPGVYAGFIHGFLFGDAFDKGLTFKMGQTHVHAWLGELLPLIEKGLLKPEEIVTHYMPFEEAARGYEIFEKREEECRKVILVPGAMSAQAAQKQATGVINPMPGGVV

SEQ ID NO: 50989 - protein, 322 aa, Candida tenuis
MSASIPDIKLSSGHLMPSIGFGCWKLANATAGEQVYQAIKAGYRLFDGAEDYGNEKEVGDGVKRAIDEGLVKREEIFLTSKLWNNYHDPKNVETALNKTLADLKVDYVDLFLIAFPIAFKFVPIEEKYPPGFYCGDGNNFVYEDVPILETWKALEKLVAAGKIKSIGVSNFPGALLLDLLRGATIKPAVLQVEHHPYLQQPKLIEFAQKAGVTITAYSSFGPQSFVEMNQGRALNTPTLFAHDTIKAIAAKYNKTPAEVLLRWAAQRGIAVIPKSNLPERLVQNRSFNTFDLTKEDFEEIAKLDIGLRFNDPWDWDNIPIFV

SEQ ID NO: 50990 - protein, 143 aa, Populus tremula
MISPSFISPLFTLAVFLTVTITPLISASGGFCQEKMATLGGVHDSQSSQNSAEIDGLARFAVDEHNKKENAILEFARVVKAKEQVVAGPMHHLTIEAIEAGKKKLYEAKVWVKPWLNFKELHEFKDAGDVPVFTSSDLGVKRG

SEQ ID NO: 50991 - protein, 573 aa, Debaryomyces hansenii CBS767
MCGIFAAFRQPEVEQFKSKALQYSKRIRHRGPDWSGNVIQNSTILCHERLAIVGLDSGAQPITSEDGNYTLAVNGEIYNHIQLRDEFPSYPYKSLSDCEPIIPLFEKYDVDAPKYLDGMFAWVLYDKKNDRIVASRDPIGITTLYMGKSSKNPKTRYFASELKCLTDECDEIFAFPPGHVYDSNTDEITRYFNPSWWEESSIPSKRVDLKEVRETLELAVRKRLMAEVPYGVLLSGGLDSSLIAAIAARETQKAAAGISKDGIDANKELSGVDEKGSLHSSGWNQLHSFAIGLPGAPDLIAAEKVAHFIGTIHHSHTFTLDEGLDALDDVIYNLETYDVTTIRASTPMYLLSRKIKAQGVKMVLSGEGSDEIFGGYLYFANAPSPKDFHEECVKRVKNLHYADCLRANKSTMAWGLEARVPFLDKQFLEVCMNINPEDKLIKPAEGKIEKYILRKAFDTSDDPNAKPYLPEEILWRQKEQFSDGVGYSWIDGLKDAAEAAISDEQFANPKAEWGTDVPTTKEAYWYRCKFDEIFHSKAAASTVMRWVPKAEWGCHADPSGRFATIHEQKVDQD

SEQ ID NO: 50992 - protein, 762 aa, Nicotiana tabacum
MLRTLALALLISAFLVSLSAADNGFPRCNCDDEGFWSIERILECQRISDLFIAIAYFSIPIELLYFVSCSNFPFKWVLFQFIAFIVLCGMTHLLNFWTYYGQHPFQLMLALTIFKVLTALVSFATAITLITLFPMLLKIKVREFMLKKKTWDLGREVGLIKQQKEAGWHVRMLTQEIRKSLDRHTILYTTLVELAKTLDLHNCAIWKPNENKTEMNLIHELKGRSFSSMYNLPIPTSDPDVREIKESDGVKLLDAYSPLAAASSGGSSEPGAVAAIRMPMLKVSNFKGGTPELVPECYAILVLVLPGEQGRSWSNQEIEIVRVVADQVAVALSHAAVLEESQHMRETLEEQNRALQQAKQDALRASQARNAFQMVMSHGLRRPMHSILGLLSLLQDDNMGIEQRLLVDAMAKTSSVVSTLINDVMDTSTKDNSRFPLEMRHFQLHSMIKEAACLAKCLCAHRGYNISIEVDKSLPNYVMGDERRVFQVILHMVGNLLKDPNGGCLTFRVLPESARREGIDGAWKTRRSHSSLENVYIRFEVGSSNNHSQPEGITSTLPHCCETRRSREVEERLSFSVCRKLVQLMQGDIWVVPNPEGFDQSMTVILGFQLRPSIAVGIPEYGESSDHSHPHSLLQGVNVLLADYDDVNRAVTRKLLEKLGCTVSAVSSGHDCLGALGPAVSSFQIVLLDLHLPDLDGFEVTMRIREFRSRNWPLIVGFASADEDVSGRCLQIGMNGIIRKPVLLPGIADELQRVLLQASIIT

SEQ ID NO: 50993 - protein, 577 aa, Arabidopsis thaliana
MDLASKKNTANVGSKEIDPIKPKSPRSSLSPFSLKLGDNVPRNPHFDPKKMDPLVKHQPPKSLEPPPSTRGTNSEGDLKHNTYSSDGDSLAMRKNAPKNLHYDPKKIVPLTTSETYSPSARNHHHHRTKSPDKKRAPRHNGDYAYGDNLVGPSAQPFKPHTGGDVRWDAINSIASKGPQIGLDNFRLLKRLGYGDIGSVYLADLRGTNAVFAMKVMDKASLASRNKLLRAQTEREILSLLDHPFLPTLYSYFETDKFYCLVMEFCSGGNLHSLRQKQPSRRFTEEAARFYASEVLLALEYLHMLGVVYRDLKPENILVRDEGHIMLSDFDLSLRCTFNPTLVKSSSVCSGGGAILNEEFAVNGCMHPSAFLPRLLPSKKTRKAKSDSGLGGLSMPELMAEPTDVRSMSFVGTHEYLAPEIIRGEGHGSAVDWWTFGIFLYELLHGTTPFKGQGNRATLHNVVGQPLKFPDTPHVSSAARDLIRGLLVKDPHRRIAYTRGATEIKQHPFFEGVNWALVRSAAPPHIPDPVDLGPYAAARGKTKSHGGGDHCNSMKPEPLVACAAGPTDDTAYIDFEYF

SEQ ID NO: 50994 - protein, 158 aa, Glycine max
MEGGRSSVSNGNVEVRYRGIRRRPWGKFAAEIRDPTRKGTRIWLGTFDTAEQAARAYDAAAFHFRGHRAILNFPNEYQSHNPNSSLPMPLAVSAPPSYSSSSSTSNYSGDDNNNHLVRPAFSGEIMQGGDHDDDTFELEYFDNKLLEELLQMQDNRPF

SEQ ID NO: 50995 - protein, 143 aa, Populus tremula
MISPSFISPLFTLAVVLTVTITPLISASGGFCQEKMATLGGVHDSQSSQNSAEIDGLARFAVDEHNKKENAMLEFARVVKAKEQVVAGTMHHLTIEAIEAGKKKLYEAKVWVKPWLNFKELHEFKDASDVPVFTSSDLGVKRG

SEQ ID NO: 50996 - protein, 383 aa, Methanopyrus kandleri AV19
MEKLVLLPGPVMVHEDVLLRSAKQVMNHRSEEFEEILTECVELSKYLFQTDGNVAIITGSGTAAMEAAIYSLLEPGEEVVAVVNGKFGERFADIAERRGAEVRRVEFEWGKVADPERVEEALADSDAEVVTLVHNETSTTVLNPAEEIARICREYDALFVVDAISSLGGVEFRMDDWGVDVCVTGSQKVLGCPPGLALVAVNDRALEVMEEKDAGSYYLDIPKYLEYLEKDPKQTPYTPAVNAFYALHEALKRLKEEGLEARWERYRLMQRIVREGIRALGLELFVEDDEIASPTVTGVTYPEGVDDREFRGEILRDRYDVVVAGGQDHLAGEIFRIGHMGEVRIRDMITAVTCIGLGMRELGVDVDVGAAAEAMADVLSEVS

SEQ ID NO: 50997 - protein, 625 aa, Streptomyces sp. JP95
MSAIAGWVDFERDLSPQAATVETMAAALAHRGPDGRGVWAEGHAALAHRRLALLDLTETGAQPAVHTTEGGAAVAVLTLDGALTNHTELRARLAAKGHRFTGRGDGETALHAYLEWGADFLTRLEGLFAIAVWDVRRQELLLARDRLGVKPLSYHPTPTGVLFGSEPKAILAHPDVDAVVDADGLRELFAHSRKPGTGVFRGMREVVPGHALIVRRPGSREQRYWSLPAREHTDSLDTTVATVRGLLADAVASHTRADAPVGAMLSGGIDSSALSALAHRDLTAAGSGPLRTFSVNFTGYTENFEPHPTMRSTPDAPFAALASRHIGSRHTEFLLDTAALTDPGVHTAALRSQDAPSPLGDMDVSLLRFFARLREEGFAAVLSGETADEVFNGYFWAYDPKHSNSQTFPWVSFERGHDAAAGGLGTSMIDRELRKRLDFLGYADQHYRDALTEVPHVDGDTAAERRAREVTYLALTRWAPTHLDRADRMSMAHGVQLRPPFCDRALVEYVYNVPAAMKRVDGVEKSLLRSAVADLLPDEVLHRRKSAYPTTQEAAYGDFVRQRFAELAADRDAAVAELLDTTATAEAVAADGSPQGAFAWVERAGMEMALQLDTWLTDYRVDLRL

SEQ ID NO: 50998 - protein, 167 aa, Arabidopsis thaliana
  misc_feature (130)..(130): Xaa can be any naturally occurring amino acid
  misc_feature (137)..(137): Xaa can be any naturally occurring amino acid
  misc_feature (139)..(141): Xaa can be any naturally occurring amino acid
  unsure (1)..(167): unsure at all Xaa locations
EHIKAMPTKKMTATLSEKKGVILLGDAFNMRHPAIASGMMVLLSDILILRRLLQPLSNLGNAQKISQVIKSFYDIRKPMSATVNTLGNAFSQVLVASTDEAKEAMRQGCYDYLSSGGFRTSGMMALLGGXNPRPISXIXXXGEHPASHSPFDWNLDFWWKGGPPEGS

SEQ ID NO: 50999 - protein, 163 aa, Zea mays
  misc_feature (18)..(18): Xaa can be any naturally occurring amino acid
  misc_feature (101)..(101): Xaa can be any naturally occurring amino acid
  unsure (1)..(163): unsure at all Xaa locations
ITMDPTKFRPSSSHDTTXVTTTNAGAPVGNDNEALTVGPRGAILLEDYHLIEKVAHFARERMPQRVGHARGAYDKGLYECTHDETALTCADLLRALGVRTXVIVRLSTAIHERGCPETIRDPRGFPVRLYTREDNWDLVGNNFPVFFIRDGIKFPDVIHAVKP

SEQ ID NO: 51000 - protein, 364 aa, Arabidopsis thaliana
MTTISDLSDDLVGDILSRVPFTSLISVRSTCKKWNALSKNQIFGRKTAARNQFLEFMILDSRVCSLRLDLQGIRNEDKEDFVDPSMKLISIPSNDDQVEISQVYHCDGLLLCIAKENSNVFVWNPYLGQTKWIRPRNTFHRYDRFALGYDNNRNHKILRFLYDEESNESSRRTHIDVYDFSSDSWRVLDVNPDCDIPFYQTGVSLKGNTYFFERFGPCLPLLFYPPCPSFETVTLSWVRDEKLAVLYNHYVTAEIIEIRISTKIEPNAVSWSSFLTVDMSLVNGLPDHFSMYFEAKSFFIDEEKKVVVLFDSKEIKTCRYQMAYIVGDDGYFKSVNIGVSPNSQRKPGRLVCSSYVPSLVQLQD

SEQ ID NO: 51001 - protein, 539 aa, Mycobacterium tuberculosis
MSKLIEYDETARRAMEVGMDKLADTVRVTLGPRGRHVVLAKAFGGPTVTNDGVTVAREIELEDPFEDLGAQLVKSVATKTNDVAGDGTTTATILAQALIKGGLRLVAAGVNPIALGVGIGKAADAVSEALLASATPVSGKTGIAQVATVSSRDEQIGDLVGEAMSKVGHDGVVSVEESSTLGTELEFTEGIGFDKGFLSAYFVTDFDNQQAVLEDALILLHQDKISSLPDLLPLLEKVAGTGKPLLIVAEDVEGEALATLVVNAIRKTLKAVAVKGPYFGDRRKAFLEDLAVVTGGQVVNPDAGMVLREVGLEVLGSARRVVVSKDDTVIVDGGGTAEAVANRAKHLRAEIDKSDSDWDREKLGERLAKLAGGVAVIKVGAATETALKERKESVEDAVAAAKAAVEEGIVPGGGASLIHQARKALTELRASLTGDEVLGVDVFSEALAAPLFWIAANAGLDGSVVVKKVSELPAGHGLNVNTLSYGDLAADGVIDPVKVTRSAVLNASSVARMVLTTETVVVDKPAKAEDHDHHHGHAH

SEQ ID NO: 51002 - protein, 331 aa, Vibrio parahaemolyticus RIMD 2210633
MINIAFFSAKSYDEASFNKIKNNRDFEFHYHDFRLTEKTAKMAHGCDVVCAFVNDDLSAPVLKQLSLGGTKLIAMRCAGFDKVDQQAAKELGLQVVRVPAYSPEAVAEHTVGLMMCLNRRLHKAYQRTRDANFSLEGLVGFNFFGKTVGVIGTGKIGIATMRIFKGLGMELLCYDPYENPLALEMGARYCSLEEIYANADVISLHCPMSEENYHLLNENAFAQMKDGVMIINTSRGELLDSVAAIEALKQGKIGALGLDVYDNEKDLFFQDKSNDVIVDDVFRRLSACHNVLFTGHQAFLTHEALNNIASVTLNSVETFFSGQVSGNELIN

SEQ ID NO: 51003 - protein, 586 aa, Triphysaria versicolor
MCGILAVLGCSDDSQAKRVRVLELSRRLKHRGPDWSGIHHHGDCYLAHQRLAIVDPASGDQPLFNEDKRIAVTVNGEIYNHEELRALLPNHKFRTGSDCDVIAHLYEEYGENFVEMLDGMFSFVLLDSRDNTFIAARDAFGITSLYIGWGLDGSVWISSELKGLHDECENFEVFPPGHVYSSKTEGFRRWYNPPWFSEAIPSTPYDPLVLRGAFEQAVIKRLMTDVPFGVLLSGGLDSSLVAAVTARHLAGTKAAKRWGSQLHSFCVGLEGSPDLKAGKEVADYLGTVHHEFLFTVQDGIDAIEDVIYHIETYDVTTIRASTPMFLMSRKIKSLGVKMVISGEGSDEIFGGYLYFHKAPNKEEFHRETCRKIKALHQYDCLRANKATSAWGLEARVPFLDKEFVNLAMSIDPEAKMIKPDQGRIEKWILRKAFDDEERPYLPKHILYRQKEQFSDGVGYSWIDGLKAHAEQHVTDKMMLNAGHIFPHNTPTTKEGYYYRMIFERFFPQNSAKLTVPGGPSVACSTATAVAWDASWSKNLDPSGRAATGVHDLAYENHVPIGNLKSKKMDSVSLGNAVGPQELTIRS

SEQ ID NO: 51004 - protein, 493 aa, Glycine max
MHGSMASAAFPVTTACFDTNTVDDRKSSFFEFKPLSRSNMVPADFNNHVSKQSTQVEGPGKTQSFASSPLVESEIAVPSNELSLSSPVQKVSSSASAPVDVDLDDINHKGNTATGLQASHVEVRGSGLSVAAEKTSDDGYNWRKYGQKLVKGSEFPRSYYKCTHPNCEVKKLFERSHDGQITEIVYKGTHDHPKPQPSCRYSTGTVMSIQGERSDKASMAGRDDKATAMYGQVSHAAEPNSTPESSPVATNDDGLEGVAGFVSNRTNEEVDNDDPFSKRRKMELGNVDITPVVKPIREPRVVVQTLSEVDILDDGYRWRKYGQKVVRGNPNPRSYYKCTNAGCPVRKHVERASHDPKAVITTYEGKHNHDVPAARNSSHDMAVPAAAAGGQTRTKLEESDTISLDLGMGISSAAEHRSNGQGKMLHSEFGDTQTHTSSSNFKFVHTTSAPVYFGVLHNSSNPFGSRDNRSDGPSLNRSSYPCPQSMGRILMGP

SEQ ID NO: 51005 - protein, 664 aa, Silicibacter sp. TM1040
MAAKDTDDRKPDDQDAEISLDMSQAQVKKMIAEAREKGYITYDQLNQVLPPDQVSSEQIEDVMSMLSEMGINIIEDEEAEEEENKGTTELVTTESNREVAVAGAATEKLDRTDDPVRMYLREMGSVELLSREGEIAIAKRIEAGRNTMILGLCESPLTFQAITIWHDELLSEDILLRDVIDLEATFGNQMDEDGDVAEPVVDPSAVSGAAKPEKDSGPELDADGNPILNNDDDDDDDDDQANMSLAAMEAALKDRVLETLERISSDFAMLSEMQDLRISATLNEDGSFSADDEAKYQQLRSEIVELVNGLHLHNNRIEALIDQLYGINRRVMQIDSAMVKLADQARINRKEFVEAYRGRELDPNWLSEMSEKPGRGWQMFIERSTEKVEELRADMAQVGQYVGLDISEFRRIVQQVQKGEKEARQAKKEMVEANLRLVISIAKKYTNRGLQFLDLIQEGNIGLMKAVDKFEYRRGYKFSTYATWWIRQAITRSIADQARTIRIPVHMIETINKLVRTGRQMLHEIGREPTPEELAEKLQMPLEKVRKVMKIAKEPISLETPIGDEEDSQLGDFIEDKNAVLPLDSAIQENLKETTTRVLASLTPREERVLRMRFGIGMNTDHTLEEVGQQFSVTRERIRQIEAKALRKLKHPSRSRKLRSFLDQ

SEQ ID NO: 51006 - protein, 555 aa, Vibrio fischeri ES114
MCSIFGILDIKSDPTPLRTTALEMSKKLRHRGPDWSGIYSSDKAILAHERLAIVGLNSGAQPLYSEDKKHILAVNGEIYNHKELREKYADNYTFQTDSDCEVILALYREKGADLLEDLNGIFAFILYDEEKDEYLIGRDHIGIIPMYHGYDEHGNYYVASEMKALVPVCKSISEFPPGHFYSSKDTEPTRYYLRDWMDYDAVKDNPTSKEDLTQALEDAVKRQLMTDVPYGVLLSGGLDSSITSAVAKRFAAMRIEDDEKSEAWWPQLHSFAVGLEGAPDLKAAREVADKLGTVHHEMTYTIQEGLDAIRDVIYHIETYDVTTIRASTPMFLMGRKIKAMGIKMVLSGEGADEIFGGYLYFHKAPNKKEFHEETVRKLLALNMFDCARANKSLAAWGVEGRVPFLDKEFIDVAMRLNPQDKMCGNGKMEKHILRECFEHYLPEAIAWRQKEQFSDGVGYSWIDTLRETAEAKVTDQQMESAKFRFPYNTPTTKEAYVYREIFEELFPLEDAAKCVPGGPSVACSSAKAIEWDESFQNCVDPSGRAVQAVHNEAYD

SEQ ID NO: 51007 - protein, 483 aa, Chlamydophila pneumoniae TW-183
MRSWLAVLVGSGLLALPLSGQAVGKKESRVSELPQDVLLKEISGGFSKVATKATPAVVYIESFPKSQAVTHPSPGRRGPYENPFDYFNDEFFNRFFGLPSQREKPQSKEAVRGTGFLVSPDGYIVTNNHVVEDTGKIHVTLHDGQKYPATVIGLDPKTDLAVIKIKSQNLPYLSFGNSDHLKVGDWAIAIGNPFGLQATVTVGVISAKGRNQLHIADFEDFIQTDAAINPGNSGGPLLNIDGQVIGVNTAIVSGSGGYIGIGFAIPSLMANRIIDQLIRDGQVTRGFLGVTLQPIDAELAACYKLEKVYGALVTDVVKGSPADKAGLKQEDVIIAYNGKEVDSLSMFRNAVSLMNPDTRIVLKVVREGKVIEIPVTVSQAPKEDGMSALQRVGIRVQNLTPETAKKLGIAPETKGILIISVEPGSVAASSGIAPGQLILAVNRQKVSSIEDLNRTLKDSNNENILLMVSQGDVIRFIALKPEE

SEQ ID NO: 51008 - protein, 344 aa, Zea mays
MGILCLGASSTLLCGEDRNNVLGLGCGNELVEVGSGHDGLDSVVGAVFPVDTDEAVRALLEKETDHKPQDGYAERLERGGLEYSWRRDAMDWICKVHSYYRFGPLSLYLAVNYLDRFLSSYDLPHDKPWMRQLLSVACLALAVKMEETVLPLPVDLQVCDVKFEFEARTIGRMELLVLATLKWRMQAVTPFTFISYFLDKFNGGKPPSMALASRCTEIIIGTLKGSTFLSFRPSEIAAASALAAVSENQVVGSSSALSASEVPINKEMIARCYELLQEQALVRKTGHINGSPSVPQSPIGVLDATCFSFRSEDVRLGSSQSNNISSSSNDNQVSKRRRLSISPI

SEQ ID NO: 51009 - protein, 534 aa, Streptococcus thermophilus CNRZ1066
MTKYIFVTGGVVSSIGKGIVAASLGRLLKNRGLKVTIQKFDPYINIDPGTMSPYQHGEVYVTDDGVETDLDLGHYERFIDINLNKYSNVTTGKIYSEVLRKERKGEYLGATVQVIPHITDALKDKIKRAATTTDSDVVITEVGGTVGDIESLPFLEALRQMKADVGSDNVMYIHTTLLPYLKAAGEMKTKPTQHSVKELRGLGIQPNMLVIRTEEPAGQGIKNKLAQFCDVAPEAVIESLDVEHIYQVPLNMQAQGMDQIVCDHLKLNAPAADMTEWSAMVDKVLNLKKTTKIALVGKYVELHDAYLSVVEALKHSGLANDTAIDIDWVNANDLTAENVASRLADADGIIVPGGFGQRGTEGKIQAIRYARENDVPMLGVCLGMQLTCIEFARHVLHLDGANSAELDPETQYPIIDIMRDQIDIEDMGGTLRLGLYPCKLKPGSKAAAAYGNQEVVQRRHRHRYEFNTKFREQFEAEGFVFSGVSPDNRLMEVVELPDKKFFVAAQYHPEYHSRPNHAEELYSAFVTAAVENAK

SEQ ID NO: 51010 - protein, 178 aa, Triticum aestivum
MMRAARYYGKEDIRVEQVPQPSVKAGQVKVAPAFVGICGTDLHEYLGGPNFCPTTPHPITKESIPVTLGHEFSGIITEVGPDVEGFEVGQPCAIQPTLFCGHCAACHNHAENVCHSGGFIGLSGSGGGLSESVCVNATHVHPLPQDLPLEIGALVEPLSVSWHAMTAAPDINPDSRVV

SEQ ID NO: 51011 - protein, 748 aa, Oryza sativa (japonica cultivar-group)
MWDLIVSHQDGVGADADAADEFEDEAAPAASWGRRRRIPGTGAAASSIFLWRQGAPASSWPLALCPHTSSTTSSSGKTFLTPRLQGVHVGHQDLNLPPPPSYTAAAASTLAAVCTLGMVRSALERATAGRSAAAACASPATSSSSSASTSSSSSIGKCHRSPPAGGAATPASPSMRAAAYPSCLTYVLIAEADPRCPRCDGSGKHPGIPPPDVAVLADSDCPARASPVTRRLRRAVRGAPVGGRRRPCPLPPPELACSAAYRAVRCPGRRERGGSGKKRGVRLTREEKRRDLKEGETEVISRSDPREEGGIFVSSSLGMLAPNRLMSQRRGRRRRRHRRPQIRARSAGFIASTGKRKISPCEHDGDGHSQAGKMMRNSIPYLPEDILSRIHSFMSMREAARAACVSRAFLRSWRCHPNLIFNKDTIGLKRNAFGENFHGKIGCILRNHSGISLKTFKLDYSGMCGFDGTSYLDSWLQIALKPGIEELTLFLFDTNKQYNFPCSLLSDGVRDSLRGFRVNFSVVETLQMKKLDMGCAIHDARANLPSIMPNLETLVIESVNEVVDAPMLPTKFIYLKHLTIRMITGSTISRPYDYFSLVSFINASPSLETLILNVTLRMVNESIFTDSQLRHIPEHHHGHLKSVKITGFSSAKSLVELTCYILNNAVSLECLTLDTIYGPRCDQDKYRRCFPMIDGVLTEAPRGLAAIRTYIEDKVPSTVNLTVLEPCSRCHVRRRVQTSSQSDNAVSI

SEQ ID NO: 51012 - protein, 577 aa, Saccharomyces kluyveri
MSTMQLGTYLFYRLSQVTKTVFGVPGDFNLNLLEHVYNFDESQIKWCGNANELNAGYAADGYSRINKFGCFITTYGVGELSALNAVSGAFAENAPVLHIVGTSSMLAKRGACPLNQIHHLIPPKKTYEAPDHKVYEKLAEPFSIHTESLSDENLEKIQDQIDSVIESIFCHMKPGYLFIPSNLPDAEIPVDLNKQLNFDFITKLRVDPHATSEMVSLTLKRIYSSRNPGFIVDQFMRFDLEKLNLFLEKFNFYCYNTTTARGFADESLPNFHGVFNNELSTNGTLEILDQNDFILHLGTNINEVSYFVGGSTPLDKKDVIFIGKDYAQVGTNGHIITGINCHVFFEELLQRMNSKTMPKVKTRKSTALYNNGYTVDDDSKTVTQANLSQVVSAQLRENDVIINEMCSFMFEMPNIKYSKGCQFVGQPFYGSIGYALPATLGASLAIKDYKKSGRVILFQGDGSAQMTLQELASYIRFEIDPIIFMLNNSGYSVERVIKGPTRSYNDIIVDWDWCNILSVFGDRNGDRSTSYKVEKLGELKNVLTKRLDYSDGKIKMVEIILDRMDVPFGFKKLIGAN

SEQ ID NO: 51013 - protein, 629 aa, Ustilago maydis 521
MVAPQRRTVMPALGLLASSLCSLLLTANAATVEQHWNINWVPDVNPDGLYPRHVIGVNGSWPPPIINVNASDTVRITATNKLETGVGASLHSHGMFFNRTGYYDGAVAITQCPIPPGQSFTYETLNSPASPADRRKQMGTFWIHAHNNDQYTDGLRSPVIIHPDDPADIHYNYDDDYTVILGDWYHSNYTDLVKNEFMNRKNPTGAEPVPKSGLIYFAHTSNKTSAATYLPGFSENATLPFEAGKTYRLRVINMSALAAFYFYLSGHDMQVIEVEGVDVLPQPVDFLSVAVAQRFSVLVTARNDTDPQNWKLHANMDEDMFDVVPEDLQLNVSATISYPNAPKDKFGPEKILEEYTYFDDLQFVPVNAEPMVTPDAVHRLDVSFDTMSDGENYAAFNNISYVAPQVPALFSAESMGALASNPAIYGPNSNAFVIKHNEMIEVQLFNWDAGKHPFHLHGHHFQVVHKSQDVTSDDPTINPPFNSSQVNPMRRDTVMVPPGGSAYLRFRADNPGAWFFHCHIDPHLVSGLASIFIEAPDVLSDSFLNVPSYIKNQCQAQGIATTGNAVGLNSTSDFDGLAKGPTYLESGWTGRAIAAFTGCIITGLLGLATVVVYGWHSGEEDDDEEEEDK

SEQ ID NO: 51014 - protein, 400 aa, Bordetella bronchiseptica RB50
MSTSQKKPTVQQKKPAAQPAEKAAFKPKKSVALSGVVAGNTALCTVGRTGNDLHYRGYDILDFAGSAEFEEIAHLLVHGKLPNKAELKAYKEKLRALRGLPAQLQNVLECLPASSHPMDVMRTAVSVLGCVLPEKDDHNTPGARDIADRLMANLGSALLYWYHYSHNGRVIDVQTDDDSIGGHFLHLLHGAKPSDEWVRAMHTSLILYAEHEFNASTFTGRVIAGTGSDMYSSITGAIGALRGPKHGGANEVAFEVQKRYETPDEAEADIRQRVENKEVIIGFGHPVYTVSDPRNKVIKDVAKKLSRKAGSTKMFDIAERLETVMWDIKKMFPNLDWFSAVSYHMMGVPTAMFTPLFVIARTAGWSAHIIEQRIDNKIIRPTANYVGPEDQTYVPISKRA

SEQ ID NO: 51015 - protein, 325 aa, Magnetospirillum magnetotacticum MS-1
MKTNAIRIHQPGGPEVMVWEEVDLAAPGAGQVLLRHTAVGLNYIDVYHRTGLYPAPLPFTPGLEGAGIVEAVGDGVTELKAGDRVAYANPPLGAYSVSRLMPADRLVKLPDHIHDRTAAAMMLQGMTAQYLLRRTYRVQPGDTILIHAAAGGVGLLVCQWAKHLGATVIGTVGSEEKAALAKAHGCDHTILYKSEDFVARVKEITKGEGVPVVYDSVGKDTFLNSLDCLRPLGMMVLFGQSSGKVEPFDTGLLGAKGSLFLTRPSLMAYTAKRSDMVASASELFEVVGKGVVKVEINQTYSLKDAAQAHRDLEARKTTGSTLLLP

SEQ ID NO: 51016 - protein, 445 aa, Oryza sativa (japonica cultivar-group)
MDHVLGCATSLVSCQKVFEGPLVNSLLSIRQGGLKMYIIEDKGGAIALMLASLFFLGTWPAVLTLLERRGRLPQHTYLDYSITNLLAAVLIALTFGQLGDSKPNMPNFFTQLSQDNWPSVLFAMAGGVVLSIGNLSTQYAWAYVGLSVTEVISSSMVVVIGTTLNYFLDNRINRAEILFPGVACFLVAVILGSAVHASNAADNEEKLNGSTNIYKLGENGSVEPNKEVIEKDAPKDLENGASATKYVAKAEAGTAEYLIELEERRSIKVFGSSTFIGLGIVFFSGVCFSLFSPAFNLATNDQWHTLKQGVPHLVVYTAFFYFSISCFVIGIGLNILFLYRPMAGVPKSSFKAYLNDWEGRQWALLAGFLCGFGNGFQFMGGQAAGYAAADAVQALPLVSTFWGILLFGEYRKSSRKTYILLGFMLFMFIVAVAVLMASSGHRSTK

SEQ ID NO: 51017 - protein, 373 aa, Ustilago maydis 521
MLNATVSASRAARSIVSVAQVARPALYGSARPSNTLAHTSPSSSRALSKTHNFGKAKKIKTPPFASTDDDVVVPYPEDSSRHPRDDVGHNTTGGRVGRHTQRTLASFSMEGKVCVVTGAARGIGNLIARTFVESGANHVAIVDLDEGESQHAAKEVDEWFTNHGGVKPGELDIQGYGCDISDEVQVQDVINRIHQRFGKINVAVNSAGIVENFPATEYPTAKLKKLFDININGSYFVAREVAKRMMQDKVQGSIVMIASMSASVVNVPQAQAPYNASKAAVKHLAKSMAVEWAKAGIRVNSLSPGYMLTSLSRAVLENSPNGKELRTNWENMTPMGRLGNPEDLKGAVVYLSSDASAFTTGADLIVDGGYTSV

SEQ ID NO: 51018 - protein, 666 aa, Chlamydia trachomatis D/UW-3/CX
MAGNSDLDIDILEKIAGTIKQLSIESIQKASSGHPGMPLGCAELAAYLYGYVLRYNSKDSRWVNRDRFVLSAGHGSALLYSCLHLAGFDVNLEDLQQFRQLQSRTPGHPEFRETDGVEATTGPLGQGVGNAVGMALSLKMLGARFNQPANSIFDAKVYCLAGDGCFMEGVSHEACSFAGSLGLDNLVLIYDHNEIILDGTLHDVSIEDTKQRFLAYGWDVFETDGHDFESLHQVFTQIKKSQCKPTLIIAHTIIGHGSPKEGTNKAHGSPLGEDGVAQTKSFWHLPEEKFFVPSAVKMFFAAKQQEGKKLQEEWQERFRVWSKQAPEQHQEYLRLIQEISIQELEEILNLIDMPESIAGRAASNKVIQVLAEDIPSLVGGSADLSSSDGTWIAKEGTISASDFLGRNIRYGVREFGMGTIMNGLAYSQVFRPFGGTFLVFSDYLRSAIRLAALSKLPVIYQFTHDSIFVGEDGPTHQPIEQIMSLRAIPGLRVIRPADANEVKGAWLAALESAGPTALILSRQNLPTLKETKRSFREGVRKGAYILVKEEGDRPDYTLCASGSEVHLAIEVAQSLMALDNRVRVISFPCWELFERQDVEYRESVIGGDLGLRVSIEAGTALGWYKYIGSNGLAIAMDGFGMSGAPNEVAETCGFTVDNIVQRILSV

SEQ ID NO: 51019 - protein, 644 aa, Zea mays
  misc_feature (570)..(570): Xaa can be any naturally occurring amino acid
  unsure (1)..(644): unsure at all Xaa locations
MKLGSKPEIFVLQDLTWRCTTELESDVVVEVGEMSFYLHKFPLLSRSGVLQRMISEYQAPADGGGMCTLQLDDIPGGAKAFELAAKFCYDVKIELNALNVVCLRCAAEYLRMTDDYAEGNLITQAECFLVDVLANWKDSIKALETCEGVLPTAEDLHLVSRCITALASKACGSDAAAPVVRNASVDKDALWNGIRSGDTTSSAAAAAAAAGMDWWYEDVSFLSLPMFKRLIQAMEAKGMRDESIAGAIMFYAGRFLPGLKRNTSFSNALASYGADGSGGAGGGMSSRNITPRAASVSAPSEGDQRYFLEEIVALLPTKKGVASTKFLLGMLRTAMLLHASPLCRENLERRIGAQLEDASLDDLLVPNLGYHVETLYDIDCVQRILDYFMSSTDGIGTGYTSPALAEEGGGSLGIPQGATPSSSLSPITMVAKLMDGFLAEVAPDTNLKLPKFQALAAVVPDYARPVDDGIYRAIDIYLKSHPWLSESEREQLCRLLNCQKLSLEACTHAAQNERLPLRVVVQVLFFEQLRLRTSIAGWFFVSDNAAGGDGARPHAGGAIVPKGTAAIAGXPQADADSDVEGDAPDGKETITDVKARVSDLEKECKSMKQEIRRLGKPRRSWSLLTRKCGFGAKVQQAQTAMSGK

SEQ ID NO: 51020 - protein, 325 aa, Anabaena variabilis ATCC 29413
MSNPRVLCLGEVLFDCLADQLGLKLEEVKSWTAYPGGAPANVACALVKLGTPAGFIGAVGEDEPGNALVKLLQEVGVDTTGVQRHSTAPTRQVYVVRDLAGDRTFAGFGQYDTSEFADTHLQAKQLPESVFQEADFLILGTLELAYPDSEKAIHRALELAEQYDLKIVLDVNWRPVFWHDENIARQKIQEIFKRVDFLKLAKEEAEWLFDTSDPGAITYRLGSIEGVLVTDGENGCGYCLGENEGKIPAFAVSVVDTTGAGDSFLAGFIHQLSQHGIHNLNDAETAKRIITYASAVGALTTTKAGAIASQPTAVEVETFLASHKI

SEQ ID NO: 51021 - protein, 816 aa, Dendrocalamopsis oldhamii
MGETAGDRVLSRLHSVRERIGDSLSAHPNELVAVFTRLVNLGKGMLQPHQIIAEYNNAIPEAERDKLKDGAFEDVLRAAQEAIVIPPWVALAIRPRPGVWEYVRVNVSELAVEELRVPEYLQFKEQLVEGSTNNNFVLELDFEPFNASFPRPSLSKSIGNGVQFLNRHLSSKLFHDKESMYPLLNFLRAHNYKGMTMMLNDRIRSLSALQGALRKAEEHLSGLSADTPYSDFHHRFQELGLEKGWGDCAKRAQETIHLLLDLLEAPDPSTLEKFLGTIPMVFNVVILSPHGYFAQANVLGYPDTGGQVVYILDQVRAMENEMLLRIKQQGLNITPRILIVTRLLPDATGTTCGQRLEKVLGTEHTHILRVPFRTENGIVRKWISRFEVWPYLETFTDDVAHEIAGELQANPDLIIGNYSDGNLVACLLAHKMGVTHCTIAHALEKTKYPNSDLYWKKFEDHYHFSCQFTTDLIAMNHADFIITSTFQEIAGNKDTVGQYESHMAFTMPGLYRVVHGIDVFDPKFNIVSPGADMSIYFPYSESHKRLTSLHPEIEELLYSDVDNNEHKFVLKDRNKPIIFSMARLDRVKNLIGLVELYGRNPRLQELVNLVVVCGDHGNPSKDKEEQAEFKKMFDHIEQYNLNGHIRWISAQMNRVRNGELYRYICDTRGAFVQPAFYEAFGLTVVESMSCGLPTFATAYGGPAEIIVHGVSGFHIDPYQGDKASALLVEFFEKCQQDPAHWTKISQGGLQRIEEKYTWKLYSERLMTLTGVYGFWKYVSNLERRETRRYLEMLYALKYRKMASTVPLAVEGEPSNK

SEQ ID NO: 51022 - protein, 476 aa, Silicibacter sp. TM1040
MSNLKEPSFRESVDLMFNRAVALMDLPPGLEEKIRVCNATYTVRFGVRLRGQIHTFTGYRSVHSEHMEPVKGGIRYAMGVNQDEVEALAALMTYKCALVEAPFGGSKGGLRIDPRQYDEHELELITRRFAYELAKRDLINPSQNVPAPDMGTGEREMAWMADQYARMNTTDINARACVTGKPLNAGGIAGRVEATGRGVQYALQEFFRYEEDKAKAGLSGTLDGKRVIVQGLGNVGYHAAKFLSEEDGCKIVAVIERDGGLYDENGLDIEDLRAWIEKHDGVDGYPSGRYIKNGAKYLEEDCDILIPAALEGVINLSNAENVKAKLIIEAANGPVTAGADEILRKKGTVIIPDMYANAGGVTVSYFEWVKNLSHIRFGRMQRRQEEARHQLVVDQLEMLSESMGKTWSLDPKFKEKYLRGAGELELVRSGLDDTMRIAYQSMRQVWHERDDVSDLRTAAYLVSIDKVASSYRAKGL

SEQ ID NO: 51023 - protein, 808 aa, Dendrocalamopsis oldhamii
MAAKLTRLHSLRERLSATFSSHPNELIALFSRYVHQGKGMLQRHQLLAEFDALIAADKEKYAPFEDILRAAQEAIVLPPWVALAIRPRPGVWDYIRVNVSELAVEELSVSEYLEFKEQLVDGHTNSNFVLELDFEPFNASFPRPSMSKSIGNGVQFLNRHLSSKLFQDKESLYPLLNFLKAHNHKGTTMMLNDRIQSLRGLQSALRKAEEYLMSFPQDTPYSEFNHRFQELGLEKGWGDTAKRVLDTIHLLLDLLEAPDPANLEKFLGTIPMTFNVVILSPHGYFAQSNVLGYPDTGGQVVYILDQVRALENEMLLRIKQQGLDITPKILIVTRLLPDAVGTTCGQRLEKVIGTEHTDILRVPFRTENGILRKWISRFDVWPFLETYTEDVANEIMREMQAKPDLIIGNYSDGNLVATLLAHKLGVTQCTIAHALEKTKYPNSDIYLDKFDSQYHFSCQFTADLIAMNHTDFIITSTFQEIAGSKDTVGQYESHIAFTLPGLYRVVHGIDVFDPKFNIVSPGADMSVYFPYTETDKRLTAFHPEIEELIYSDVENSEHKFVLKDKNKPIIFSMARLDRVKNMTGLVEMYGKNAHLRDLANLVIVAGDHGKESKDREEQAEFKRMYSLIDEYKLKGHIRWISAQMNRVRNGELYRYICDTKGVFVQPAFYEAFGLTVIESMTCGLPTIATCHGGPAEIIVDGVSGLHIDPYHSNKAADILVNFFEKCKEDPTYWDKISQGGLKRIYEKYTWKLYSERLMTLTGVYGFWKYVSNLERRETRRYLEMFYALKYRSLASAVPLAVDGDSAAN

SEQ ID NO: 51024 - protein, 463 aa, Arabidopsis thaliana
MAGIVTEPWSVAENGNPSITAKGSSRELRLGRTAHNMSSSSLRKKSDLRVIQKVPYKGLKDFLSNLQEVILGTKLAILFPAIPAAIICTYCGVSQPWIFGLSLLGLTPLAERVSFLTEQLAFYTGPTLGGLLNATCGNATELIIAILALTNNKVAVVKYSLLGSILSNLLLVLGTSLFCGGIANIRREQRFDRKQADVNFFLLLLGFLCHLLPLLVGYLKNGEASAAVLSDMQLSISRGFSIVMLISYIAYLVFQLWTHRQLFDAQEQEDEYDDDVEQETAVISFWSGFAWLVGMTLVIALLSEYVVATIEEASDKWNLSVSFISIILLPIVGNAAEHAGAVIFAFKNKLDISLGVALGSATQIGLFVVPLTIIVAWILGINMDLNFGPLETGCLAVSIIITAFTLQDGSSHYMKGLVLLLCYFIIAICFFVDKLPQKQNAIHLGHQAMNNVVTATGGGVFSS

SEQ ID NO: 51025 - protein, 324 aa, Exiguobacterium sp. 255-15
MMKAWLNHTGEAIDQWTFEEIETPTPGAGQALIRVKSVALNPVDYKAIKNPAWTYPHVPGVDLTGIVEQTGPNVTGIKVGERIAVHTNLQKNGAFAEYAVVDARALAKIPDAVSFSEAAAILCAGMTAYEAIIQKMNTTGKETILIHAGAGGVGGIGIQLAKRLGLAVATTASTENHDWVKKLGADLAIDYKTENVTEVIRDWTNGRGADLIFNTVGRDEATADLGRLAFSGQLAFIAGGPDQSVVKPFTLSPSIHEVALAAAYAIEDDRAIRNLGHMADELLKLVAAKELDPLVTEEIPAADLVKGLQRLSERHVRGKLIATF

SEQ ID NO: 51026 - protein, 105 aa, Arabidopsis thaliana
MDPLLWDQLASHSTAFAVEQFSDGVGYSWIDGLKDHAAQNVNDKMMSNAGHIFPHNTPNTKEAYYYRMIFERFFPQNSARLTVPGGATVACSTAKAEDQLAFHST

SEQ ID NO: 51027 - protein, 880 aa, Mannheimia succiniciproducens MBEL55E
MTEEYLMMRNNINMLGRFLGETIQEAQGDDILELIENIRVLSRNSRSGDDKARAALLDTLSTISADNIIPVARAFSQFLNLTNVAEQYQTMSRSHEDKVSAERSTAALFARLKEQHVSQEEIIKTVQKLLIEIVLTAHPTEVTRRSLMHKQVEINKCLAQLDHTDLTAEEQKNIEYKLLRLIAEAWHTNEIRTNRPTPLEEAKWGFAVIENSLWEGLPAFIRKLNDAAVEHLNYALPVDLTPVRFSSWMGGDRDGNPFVTAKITREALQLARWKAADLFLTDIQELCDELSMTQCTAEFREKYGDHLEPYRVVVKDLRSKLKNTLDYYNDILAGRIPPFKQDEIISEDQQLWQPLYDCYQSLTACGMRIIANGLLLDTLRRVRCFGVTLLRLDIRQESTRHSDAIGEITRYIGLGDYSQWTEDDKQAFLIRELSSRRPLIPHNWTPSEHTREILDTCKVIAKQPEGVISCYIISMARTASDVLAVHLLLKEAGISYHLPVVPLFETLDDLDASKEVMTQLFNVGWYRGVIKNRQMIMIGYSDSAKDAGMMAASWAQYRAQDALVKLCEQTGIELTLFHGRGGTVGRGGAPAHAALLSQPPRSLKNGLRVTEQGEMIRFKLGLPAIAAESLDLYASAILEANLLPPPEPKASWCRVMDELAVASCEIYRNVVRGDKDFVPYFRSATPEQELAKLPLGSRPAKRNPNGGVESLRAIPWIFAWMQNRLMLPAWLGAGASIRQAMESGKAAVIEEMCNHWPFFNTRIGMLEMVFSKTDSWLSEYYDQRLVKKELWYLGESLRKQLSEDIATVLRLSGKGDQLMSDLPWVAESIALRNVYTDPLNLLQVELLRRLRADPEHPNPDIEQALMITITGIAAGMRNTG

SEQ ID NO: 51028 - protein, 429 aa, Vibrio fischeri ES114
MADKKATLHIEGQSPIDMPIMDGTIGPEVIDVRKLGANGYFTFDPGFLATASCESQITYIDGDKGVLLHRGFPIDQLANNADYLEVCYILLNGEAPNREEYETFKDIVTRHTMVHEQISSFFHGFRRDAHPMAVMCGVVGALAAFYHDSLDINNDEHREIAAFRLLSKMPTLSAMSYKYSIGQPFIYPRNDLTYAENFLHMMFANPCEEYEVNPVVARAMDKIFTLHADHEQNASTSTVRLAGSSGANPFACIAAGIASLWGPAHGGANEACLRMLEEIGSVDNIDEYVAKAKDKDDPFRLMGFGHRVYKNYDPRATVMREACHDVLKELNIKDPLLDVAMELERIALSDEYFVSKKLYPNVDFYSGIILKAIGIPVSMFTVIFAMSRTVGWIAHWSEMHSDPTNRIGRPRQLYTGEELREFKPLHERE

SEQ ID NO: 51029 - protein, 411 aa, Rickettsia montanensis
DSEFAELKIRGKIFELPILKASIGEDVIDISRVSAEADCFTYDPGFMSTASCQSTITYIDGDKGILRHRGYDIKDLAEKSDFLEVAYLLIYGELPSGEQYNNFTKQVAHHSLVNERLHYLFQTFCSSSHPMAIMLAAVGSLSAFYPDLLNFKEADYELTAIRMIAKIPTIAAMSYKYSIGQPFIYPDNSLDFTENFLHMMFATPCTKYKVNPIIKNALNKIFILHADHEQNASTSTVRIASSSGANPFACISTGIASLWGPAHGGANEAVINMLKEIGSSEYIPKYIAKAKDKNDPFRLMGFGHRVYKNYDPRAAVLKETCKEVLKELGQLDNNPLLQIAIELEAIALKDEYFIERKLYPNVDFYSGIIYKAMGIPSQMFTVLFAIARTVGWMAQWKEMHEDPEQKISRPR

SEQ ID NO: 51030 - protein, 645 aa, Borrelia garinii PBi
MRDTVPKRFKEAITLYSELDIFMYKEGDSKSFKKQIYADFWNEVKRVASGLLHYGIKRGEKVVIISDSRREWVIIDIAALGLGCVDVPRGNDSSEDELTYIINHSESTFIFVENNKQLQKVLSKKHDLRLVKYIVVIDDDKSYEEKMGTITVFSYKKLLELGAEHLRANPKSFDIEIEKGSSKDIATIIYTSGTTGMPKGVMLRHESFIFQLDRLYDYLPAIKPGKIMISILPLWHSFERACEYIVALKGVAIAYSKPIGPVLLKDFLLLNPQMIISVPRIWEGIRIGIIKKVSESLIKKLVFGGFLKIGIIYAKLNEKFLGFSPVYRKPNLFISIFSKLFLFIGIILIFPIKLLGDILVFKKIKNALGQNFEFGVSGGGALVDYVDYFFKAIGIKVLEGYGLTETGPVLSVRRLKGPVARTVGPILPDVEYKVVGIDGKVLPYGEKGELWVKSPQIMSGYFKDKAKTSEVLTEDGWFNTGDLVRLTINNEISIVGRSKDTIVLRGGENIEPEPLERVLGKSLFIENIMIVGQDQKFLGAVIVPNFDNLEKWANSSGISFSSRSDLLVNEGVNKLYSKHISDTINTKSGFKNFEKIVGFVLLQDSFSIGEELTNTLKLKRYYISQKYEDKIRLIFSKSDLDLNGY

SEQ ID NO: 51031 - protein, 519 aa, Oryza sativa (japonica cultivar-group)
MGMLALNGLMSLRRDRRRRRRHHRPQIRARSGGLIASTGKRKTSPCQQDDYDGDSQAGKIMRNSIPDLPEDILFRIQSFMSMREAARAACVSRAFLHSWRCHPNLIFNKDTIVLKRNAFGENFHGKIGRILRNHSGISLKTFQLDYSGMCGFDGTSYLDSWLQIALKPEIEELTLFLPETNKQYSFPCSLLSDGVRDSLRYIKLRCCALHPTPELGPLRNLSNLHLLYVSITWAELECLLSNSLALEHLELNHCKGIICLKIPCTLQQLSSLNVVECSGLKVIESKAPNLSSLFVRGSRVNFSLVETLQINKLDMGHAICDARAKLPSIMPNLETLVIESGHEVVDAPMLPTKFLYLKHLTIHVITGSTISQPYDYFSLVSFIDASPSLETLILNVTQVRMVHESIFTDSQLRHIPGHRHGHLKSVKITGFSSAKSLVELTCYILNNAVSLECLTLDTIYGPRCDQDKYRRCFPMIDGVLTDAPRGLAAIRTYIEDKVPSTVNLTVLEPCSRCHVRRRG

SEQ ID NO: 51032 - protein, 589 aa, Vibrio fischeri ES114
MSSIPVREFDAVVIGAGGAGMRAALQISEQGLSCALLSKVFPTRSHTVSAQGGITVALGNAHEDHWEQHMYDTVKGSDYIGDQDAIEYMCKNGPESVIELEKMGLPFSRFDNGTIYQRPFGGQSKNFGGEQAARTAAAADRTGHALLHTLYQQNIKHKTTIFSEWYALDLVKNEDGAILGCTALCMETGEVCYFKSKATILATGGAGRIYASTTNAHINTGDGVGMAIRAGVPMQDIEMWQFHPTGIAGAGVLVTEGCRGEGGYLLNKDGERFMERYAPNAKDLAGRDVVARSMMVEIREGRGCDGPWGPHIKLKLDHLGKETLESRLPGVCELSRTFAHVDPVKEPIPVIPTCHYMMGGVPTQVSGQAIKQDESGADVEVQGLFACGEIASVSVHGANRLGGNSLLDLVVFGRATGLHLGETLKKQAEAKPATEEDIQRSLERYNRWENSTGGEDPAQIRKDLQQCMQNNFSVFREGDAMAKGLEELKVIRERLNNAYLSDKSTEFNTQRIECLELENLMETAFATAVAANYRTESRGAHARFDFPERDDANWLCHSIYNPETESMSKRNVNMEPVHREAFPPKARTY

SEQ ID NO: 51033 - protein, 914 aa, Oryza sativa (japonica cultivar-group)
MMHGLWVQDQGVVDHLAQLVPLLHECASHVTEGSFEKADFSFKKIRMLTIADGPLQRLSTIIVDSLAHRLLSSIQGLPGALIDPSDYFEKSTLRAARHNFFKLNPYLSTGFVTINWAIMEAMEDEKVDLQVVHIVDLSCSAAHPWQWPKLLDDFHGRPGGAPELYLTVLHDDNDFLADMQSLLSKKAESLGVSFHFISVIGRLETLDFSNLRSTFQIKFGVAVAISCALQMHRLLLVDDNLSSTSIAQLQKMANFTQPKQMASSVCSPASTLNYLQTPSPRTPKLLARLLSAIRALKPNIMLIMEQDADHNTLLFRDRFNEVLNYYAALFDCFHAVAAANPGRTDERLRVDRMILREEIKNILVCEGVHRHERHERLDQWAMHMEESGFHNVQLSFSAIREAYVWQLKVQADNLRLCCTDRGMFQDDMLSSATSSPASSVYSPSPSPSNGSWVQELSHDQQSVRLIGLLYQCAAEVSAGSFDRANLCLEHITQLASLDAPHALQRLAAVFADALARKLLNLILGLSRALLSSANSADAHLVPVARRHMFDVLPFLKLAYLTTNHAILEAMEGERFVHVVDFSGPAANPVQWIALFHAFRGRREGPPHLRITAVHDSKEFLANMAAVLSKEAEAFDIAFQFNAVEAKLDEMDFDALRHDLGVRSGEALAVSVVLQLHRLLAVDDGRRHAAAGCLTPVQIIARSSPRSFGELLERELNTRLQLSPDASVVSSLSPHSPAAATAAHPTTSTPKLGSFLSAVRSLSPKIMVMTEQEANHNGGAFQERFDEALNYYASLFDCLQRSAAAAAERARVERVLLGEEIRGVVACEGAERVERHERARQWAARMEAAGMERVGLSYSGAMEARKLLQSCGWAGPYEVRHDAGGHGFFFCWHKRPLYAVTAWRPAASRRGHTRS

SEQ ID NO: 51034 - protein, 471 aa, Legionella pneumophila str. Lens
MTIALVWFRQDLRLTDNPAFIEACSHHEIVIPLYIYDDKCSVLGQAQAWWLHHSLIALGKSLNQQGLCLVLRKGAPQEIILELVAQYGVESVYWNRCYEPQAIARDKKIKLALGEREIKVQSFNGNLLHEPWTIKNKNGDFFKVFTPYWKQCRQILNIPSPFMLTKRPRGIKITSDDLGKWKLLPAINWAARFSEYWTPGEEGAQKKLDEFIVHHLSGYKRERDFPAKNATSRLSPHLHFGEISPWVILRALELAKLEQTCDLASVEHFLSELGWREFSVYLLYHFPKLDCENFRKEFDAFPWQNDEQLLTCWQKGMTGYPIIDAGMRELWATGYMHNRVRMIVASFLTKDLLIDWRSGAQWFLDTLVDADLANNSASWQWVAGCGADAAPYFRIFNPVLQSQKFDPDGVYIRQWIPELAQLNSQSIHQPWTDADASSIFLGKKYPKPIIDHQEARTKALSYYQQIKKGMD

SEQ ID NO: 51035 - protein, 143 aa, Arabidopsis thaliana
EGIQELGSNLSMIQQLFPERTRDQMKLKFKLEERRNPLKLNDALSSRSKHFTHFKNVIKKLQQEAAAAKEGEEEEEAGAEAETTDVPENEEPEKSEETERASDGVAAGVKESDGGDVENGVRSDGGDECDDDEDFWNSYKSDM

SEQ ID NO: 51036 - protein, 457 aa, Triticum aestivum
VTHLSQRDAADIDEQLMGPLGFSVDQLMELAGLSVATAVAEVYKLSEHTRVLIICGPGNNGGDGLVAARHLYHFGYKPFVCYPKRTAKPLYSGLVTQLESLAIPFVPVEDLPQDLSGQYDIVIDAMFGFSFHGAPRPPFDDLIQMLVSLSVVGDSAKRPPIVSVDIPSGWHVEEGDVSGGGIKPDMLVSLTAPKLCAKKFTGPHHFLGGRFVPPPISSKYGLELPPYPGTSMCVRIGKVPSVDISSLRENYISPELLENQVMPNPFDQFRTWFDEAVTAGLREPNAMALTTVNKAGKPSSRMVLLKGVDKQGFVWYTNYGSQKAHDLSENSNAALLFYWNEMNRQVRVEGSVQKVSEEESEKYFHSRPRGSQLGAIVSKQSTVISGREVLQQAYKELEQKYSDGSFIPKPDYWGGYRLTPNLFEFWQGQQSRLHDRLQYSQRELGGSTEWHIQRLSP

SEQ ID NO: 51037 - protein, 478 aa, Burkholderia mallei ATCC 23344
MPAAPAVPSRAARASAAARLERLPFSGYHKLIFVIIAIAFFFDSVDLGTMTFVLGSIKREFGLSTATAGLVASASFFGMVLGAAVAGLLADRFGRRPVFQWSMVLWGAASYLCSTAQSVDALIVYRVLLGIGMGMEFPVAQTLLSEFVPAAKRGRLIALMDGFWPLGFITAGVVSYFVLPLFGWRTVFALLELPAVFVLVVRRLVPESPRWLEHRGRLAEAGRVLAHVEAKVMKSARVASLPAPSRLAEPACAQGRGAFGEIWSAAYRRRTTMVWLLWFFALLGFYGLTSWLGALLQQAGFAVTQSVFYTVLISLGGIPGFLCAAWLVERWGRKPTCIASLVGGGAMAYVYGQSALFGGSVTLLVGTGLAMQFFLFGMWAVLYTYTPELYGTGARATGSGFASAIGRVGSLIGPYAVGIVLPVFGQGGVFTLGALSFVVAALAVGVLGIETQGLALEALASTHAADDDARDPAGAAAN

SEQ ID NO: 51038 - protein, 396 aa, Brassica napus
MAMSMDRIVVSPSSYVCRPSQARGSRSSVVSMASTIRSASTEVTNGKKLYIPPREVHVQVKHSMPPQKLEIFKSLEGWADETLLTYLKPVEKSWQPTDFLPEAESEGFYDQVKELRERCKELPDEYFVVLVGDMITEEALPTYQTMLNTLDGVRDETGASPTPWAVWTRAWTAEENRHGDLLNKYLYLSGRVDMRQIEKTIQYLIGSGMDPKTENNPYLGFIYTSFQERATFISHGNTARHAKDLGDLKLAQICGTIAADEKRHETAYTKIVEKLFEIDADGTILGLADMMKKKISMPAHLMYDGQDDNLFEHFSTVAQRLGVYTAKDYADILEFLVERWNVETLSGLSSEGHKAQDFVCGLPARIRKIEERAQGRAKEAAKNVPFSWIFGREIRA

SEQ ID NO: 51039 - protein, 745 aa, Corynebacterium glutamicum ATCC 13032
MTSNFSSTVAGLPRIGAKRELKFALEGYWNGSIEGRELAQTARQLVNTASDSLSGLDSVPFAGRSYYDAMLDTAAILGVLPERFDDIADHENDGLPLWIDRYFGAARGTETLPAQAMTKWFDTNYHYLVPELSADTRFVLDASALIEDLRCQQVRGVNARPVLVGPLTFLSLARTTDGSNPLDHLPALFEVYERLIKSFDTEWVQIDEPALVTDVAPEVLEQVRAGYTTLAKRDGVFVNTYFGSGDQALNTLAGIGLGAIGVDLVTHGVTELAAWKGEELLVAGIVDGRNIWRTDLCAALASLKRLAARGPIAVSTSCSLLHVPYTLEAENIEPEVRDWLAFGSEKITEVKLLADALAGNIDAAAFDAASAAIASRRTSPRTAPITQELPGRSRGSFDTRVTLQEKSLELPALPTTTIGSFPQTPSIRSARARLRKESITLEQYEEAMREEIDLVIAKQEELGLDVLVHGEPERNDMVQYFSELLDGFLSTANGWVQSYGSRCVRPPVLFGNVSRPAPMTVKWFQYAQSLTQKHVKGMLTGPVTILAWSFVRDDQPLATTADQVALALRDEINDLIEAGAKIIQVDEPAIRELLPLRDVDKPAYLQWSVDSFRLATAGAPDDVQIHTHMCYSEFNEVISSVIALDADVTTIEAARSDMQVLAALKSSGFELGVGPGVWDIHSPRVPSAQEVDGLLEAALQSVDPRQLWVNPDCGLKTRGWPEVEASLKVLVESAKQAREKIGATI

SEQ ID NO: 51040 - protein, 2410 aa, Mycobacterium ulcerans
MVSTEENLRVYLKQVITDLHQMQARLRKIEKQRSERVAVVGMACRFPGGVASADQLWDLVIAGRDVVGNFPADRGWDVEGLFDPDPDAVGKTYTRYGAFLDDAAGFDAGFFGISPREARAMDPQQRLLLEVCWEALETAGIPAHTLAGTSTGVFVGAWAQSYGATNSDGAEGYAMTGGSTSVMSGRIAYTLGLEGPAITVDTACSSSLVAIHLACQSLRNNESQLALAGGVTVMSTPAVFTEFSRQRGLAPDGRCKAFAATADGTGWGEGAAVLVLERLSEARRNNHPVLAIVAGSAINQDGASNGLTAPHGPSQQRVINQALANAGLTHDQVDAVEAHGTGTTLGDPIEASALHATYGHHHTPDQPLWLGSIKSNIGHTQAAAGAAGVVKMIQAITHATLPATLHVDQPSPHIDWSSGTVRLLTEPIQWPNTDHPRTAAVSSFGISGTNAHLILQQPPTPDTTQTPNTTTGSDPAVGSDSAVGSDPAVGVLVWPLSARSAPGLSAQAARLYQHLSAHPDLDPIDVAHSLATTRSHHPHRATITTSIEHHSENNHDTTDALAALHALANNGTHPLLSRGLLTPQGPGKTVFVFPGQGSQYPGMGADLYRQFPVFAHALDEVAAALNPHLDVALLEVMFSQQDTAMAQLLDQTFYAQPALFALGTALHRLFTHAGIHPDYLLGHSIGELTAAYAAGVLSLQDAATLVTSRGRLMQSCTPGGTMLALQASEAEVQPLLEGLDHAVSIAAINGATSIVLSGDHDSLEQIGEHFITQDRRTTRLQVSHAFHSPHMDPILEQFRQIAAQLTFSAPTLPILSNLTGQIARHDQLASPDYWTQQLRNTVRFHDTVAALLGAGEQVFLELSPHPVLTQAITDTVEQAGGGGAAVPALRKDRPDAVAFAAALGQLHCHGISPSWNVLYCQARPLTLPTYAFQHQRYWLLPTAGDFSGANTHAMHPLLDTATELAENRGWVFTGRISPRTQPWLNEHAVESAVLFPGTGFVELALHVADRAGYSSVNELIVHTPLLLAGHDTADLQITVTDTDDMGRQSLNIHSHPHIGHDNTTTGDEQPEWVLHASAVLTAQTTDHNHLPLTPVPWPPPGTAAIEVDDFYDDLAAQGYNYGPTFQGVQRIWRDHATPDVIYAEVELPEDTDIDGYGIHPALFDAALHPLLALTQPPTNDTDDTNTADTGDQVRLPYAFTGISLHATHATRLRVRLTRTGADAITVHTSDTTGAPVAIIDSLITRPLTTATGSAPATTAAGLLHLSWPPHPDTTTDTDTDTDALRYQVIAEPTQQLPRYLHDLHTSTDLHTSTTEADVVVWPVPVPSNEELQAHQASDTAVSSRIHTLTRQTLTVVQDWLTHPDTTGTRLVIVTRHGVSTSAHDPVPDLAHAAVWGLIRSAQNEHPGRFTLLDTDDNTNSDTLTTALTLPTRENQLAIRRDTIHIPRLTRTAVLTPPDSGPWRLDTTGKGDLANLALLPTAHTALASGQIRIDVRAAGLNFHDVVVALGLIPDDGFGGEAAGVISEIGPDVYGFAVGDAVTGMTVSGAFAPSTVADHRMVMTIPARWSFPQAASIPVVFLTAYIALAEISGLSRGQRVLIHAGTGGVGMAAIQLAHHLGAEVFATASAAKWSTLEALGVPRDHIASSRTLDFSNAFLDATNGAGVDVVLNCLSGEFVEASLALLPRGGHFVEIGKTDIRDTEVIAATHPGVIYRALDLLSVSPDHIQRTLAQLSPLFATDTLKPLPTTNYSIYQAISALRDMSQARHTGKIVLTAPVVVDPEGTVLITGGTGTLGALFAEHLVSAHGVRHLLLTSRRGPQAHGATDLQQRLTDLGAHVTITACDISDPEALAALVNSVPTQHRLTAVVHTAAVLADTPVTELTGDQLDQVLAPKIDAAWQLHQLTYEHNLSAFIMFSSMAGMIGSPGQGNYAAANTALDALADYRHRLGLPATSLAWGYWQTRTGVTAHLTDVDLARMTRLGLMPIATSHGLALFDAALATGQPVSIPAPINTHTLARHARDNTLTPILSALITTPRRRAASAATDLAARLNGLSPQQQQQTLATLVAAATATVLGHHTPESISPATAFKDLGIDSLTALELRNTLTHNTGLDLPPTLIFDHPTPHALTQHLHTRLTQSHTPVGPIASLLSHAIDEGKFRAGADLLMAASNLNQSFSNMAELNQLPAVTDIADASPDGLLTLICISTSENEYARLAAANIHSLTFAEIAAPGFYDAQLPNSIETSAEALATAITGAYANTSIVLVAHSIVCELAQATMTRLQDADIDLVGLVLLDPLEGTNSTEDYVETVLTRIEHINAPRVGVDGYLAALGRYLQFHEDRRIPIPETRHMTLHSDTKIDRAQTPMNLLQDEAALTALKIGNWMNDTGSIAVTLRDGPVFLGRARSVNMR

SEQ ID NO: 51041 - protein, 16990 aa, Mycobacterium ulcerans
MIFGDAHQNCRGGRVLGDAVAVVGMSCRVPGASDPDALWALLRDGISVVDEIPSARWNLDGLVAHRLTDEQRSALRHGAFLDDVEGFDAAFFGINPSEAGSMDPQQRLMLELTWAALEDARIVPEHLSGSSSGVFTGAMSDDYTTAVTYRAAMTAHTFAGTHRSLIANRVSYTLGLRGPSLVIDTGQSSSLVAVHVAMESLRREETSLAIAGGIHLNLSLAAALSAAHFGALSPDGRCYTFDARANGYVRGEGGGVVVLKRLNDALADGNHIYCVIRGSSVNNDGATQDLTAPGVDGQRQALLQAYERAEIDPSEVQYVELHGTGTRLGDPTEAHSLHSVFGTSTVPRSPLLVGSIKTNIGHLEGAAGILGLIKTALAVHHRQLPPSLNYTVPNPKIPLEQLGLRVQTTLSEWPDLDKPLTAGVSSFSMGGTNAHLILQQPPTPDTTQTPNPTTGSDPAVGSDPAVGVLVWPLSARSAPGLSAQAARLYQHLSAHPDLDPIDVAHSLATTRSHHPHRATITTSIEHHSENNHDTTDALAALHALANNGTHPLLSRGLLTPQGPGKTVFVFPGQGSQYPGMGADLYRQFPVFAHALDEVAAALNPHLDVALLEVMFSQQDTAMAQLLDQTFYAQPALFALGTALHRLFTHAGIHPDYLLGHSIGELTAAYAAGVLSLQDAATLVTSRGRLMQSCTPGGTMLALQASEAEVQPLLEGLDHAVSIAAINGATSIVLSGDHDSLEQIGEHFITQDRRTTRLQVSHAFHSPHMDPILEQFRQIAAQLTFSAPTLPILSNLTGQIARHDQLASPDYWTQQLRNTVRFHDTVAALLGAGEQVFLELSPHPVLTQAITDTVEQAGGGGAAVPALRKDRPDAVAFAAALGQLHCHGISPSWNVLYCQARPLTLPTYAFQHQRYWLLPTAGDFSGANTHAMHPLLDTATELAENRGWVFTGRISPRTQPWLNEHAVESAVLFPNTGFVELALHVADRAGYSSVNELIVHTPLLLAGHDTADLQITVTDTDDMGRQSLNIHSHPHIGHDNTTTGDEQPEWVLHASAVLTAQTTDHNHLPLTPVPWPPPGTAAIEVDDFYDDLAAQGYNYGPTFQGVQRIWRDHATPDVIYAEVELPEDTDIDGYGIHPALFDAALHPLLALTQPPTNDTDDTNTADTGDQVRLPYAFTGISLHATHATRLRVRLTRTGADAITVHTSDTTGAPVAIIDSLITRPLTTATGSAPATTAAGLLHLSWPPHPDTTTDTDTDTDALRYQVIAEPTQQLPRYLHDLHTSTDLHTSTTEADVVVWPVPVPSNEELQAHQASDTAVSSRIHTLTRQTLTVVQDWLTHPDTTGTRLVIVTRHGVSTSAHDPVPDLAHAAVWGLIRSAQNEHPGRFTLLDTDDNTNSDTLTTALTLPTRENQLAIRRDTIHIPRLTRHSSDGALTAPVVVDPEGTVLITGGTGTLGALFAEHLVSAHGVRHLLLTSRRGPQAHGATDLQQRLTDLGAHVTITACDISDPEALAALVNSVPTQHRLTAVVHTAAVLADTPVTELTGDQLDQVLAPKIDAAWQLHQLTYEHNLSAFIMFSSMAGMIGSPGQGNYAAANTALDALADYRHRLGLPATSLAWGYWQTHTGLTAHLTDVDLARMTRLGLMPIATSHGLALFDAALATGQPVSIPAPINTHTLARHARDNTLAPILSALITTPRRRAASAATDLAARLNGLSPQQQQQTLATLVAAATATVLGHHTPESISPATAFKDLGIDSLTALELRNTLTHNTGLNLSSTLIFDHPTPHAVAEHLLEQIPGIGALVPAPVVIAAGRTEEPVAVVGMACRFPGGVASADQLWDLVIAGRDVVGNFPADRGWDVEGLFDPDPDAVGKTYTRYGAFLDDAAGFDAGFFGISPREARAMDPQQRLLLEVCWEALETAGIPAHTLAGTSTGVFVGAWAQSYGATNSDDAEGYAMTGGATSVMSGRIAYTLGLEGPAITVDTACSSSLVAIHLACQSLRNNESQLALAGGVTVMSTPAVFTDFSRQRGLAPDGRCKAFAATADGTGWGEGAAVLVLERLSEARRNNHPVLAIVAGSAINQDGASNGLTAPHGPSQQRVINQALANAGLTHDQVDAVEAHGTGTTLGDPIEAGALHATYGHHHTPDQPLWLGSIKSNIGHTQAAAGAAGVVKMIQAITHATLPATLHVDQPSPHIDWSSGTVRLLTEPIQWPNTDHPRTAAVSSFGISGTNAHLILQQPPTPDTTQTPNPTTGSDPAVGSDSAVGSDPAVGVLVWPLSARSAPGLSAQAARLYQHLSAHPDLDPIDVAHSLATTRSHHPHRATITTSIEHHSENNHDTTDALAALHALANNGTHPLLSRGLLTPQGPGKTVFVFPGQGSQYPGMGADLYRQFPVFAHALDEVAAALNPHLDVALLEVMFSQQDTAMAQLLDQTFYAQPALFALGTALHRLFTHAGIHPDYLLGHSIGELTAAYAAGVLSLQDAATLVTSRGRLMQSCTPGGTMLALQASEAEVQPLLEGLDHAVSIAAINGATSIVLSGDHDSLEQIGEHFITQDRRTTRLQVSHAFHSPHMDPILEQFRQIAAQLTFSAPTLPILSNLTGQIARHDQLASPDYWTQQLRNTVRFHDTVAALLGAGEQVFLELSPHPVLTQAITDTVEQAGGGGAAVPALRKDRPDAVAFAAALGQLHCHGISPSWNVLYCQARPLTLPTYAFQHQRYWLLPTAGDFSGANTHAMHPLLDTATELAENRGWVFTGRISPRTQPWLNEHAVESAVLFPNTGFVELALHVADRAGYSSVNELIVHTPLLLAGHDTADLQITVTDTDDMGRQSLNIHSRPHIGHDNTTTGDEQPEWVLHASAVLTAQTTDHNHLPLTPVPWPPPGTAAIEVDDFYDDLAAQGYNYGPTFQGVQRIWRDHATPDVIYAEVELPEDTDIDGYGIHPALFDAALHPLLALTQPPTNDTDDTNTADTGDQVRLPYAFTGISLHATHATRLRVRLTRTGADAITVHTSDTTGAPVAIIDSLITRPLTTATGSAPATTAAGLLHLSWPPHPDTTTDTDTDTDALRYQVIAEPTQQLPRYLHDLHTSTDLHTSTTEADVVVWPVPVPSNEELQAHQASDTAVSSRIHTLTRQTLTVVQDWLTHPDTTGTRLVIVTRHGVSTSAHDPVPDLAHAAVWGLIRSAQNEHPGRFTLLDTDDNTNSDTLTTALTLPTRENQLAIRRDTIHIPRLTRHSSDGALTAPVVVDPEGTVLITGGTGTLGALFAEHLVSAHGVRHLLLTSRRGPQAHGATDLQQRLTDLGAHVTITACDISDPEALAALVNSVPTQHRLTAVVHTAAVLADTPVTELTGDQLDQVLAPKIDAAWQLHQLTYEHNLSAFIMFSSMAGMIGSPGQGNYAAANTALDALADYRHRLGLPATSLAWGYWQTHTGLTAHLTDVDLARMTRLGLMPIATSHGLALFDAALATGQPVSIPAPINTHTLARHARDNTLAPILSALITTPRRRAASAATDLAARLNGLSPQQQQQTLATLVAAATATVLGHHTPESISPATAFKDLGIDSLTALELRNTLTHNTGLNLSSTLIFDHPTPHAVAEHLLEQIPGIGALVPAPVVIAAGRTEEPVAVVGMACRFPGGVASADQLWDLVIAGRDVVGNFPADRGWDVEGLFDPDPDAVGKTYTRYGAFLDDAAGFDAGFFGISPREARAMDPQQRLLLEVCWEALETAGIPAHTLAGTSTGVFVGAGAQSYGATNSDDAEGYAMTGGATSVMSGRIAYTLGLEGPAITVDTACSSSLVAIHLACQSLRNNESQLALAGGVTVMSTPAIFTEFSRQRGLAPDGRCKAFAATADGTGWGEGAAVLVLERLSEARRNNHPVLAIVAGSAINQDGASNGLTAPHGPSQQRVINQALANAGLTHDQVDAVEAHGTGTTLGDPIEAGALHATYGHHHTPDQPLWLGSIKSNIGHTQAAAGAAGVVKMIQAITHATLPATLHVDQPSPHIDWSSGTVRLLTEPIQWPNTDHPRTAAVSSFGISGTNAHLILQQPPTPDTTQTPNPTTGSDPAVGSDSAVGSDPAVGVLVWPLSARSAPGLSAQAARLYQHLSAHPDLDPIDVAHSLATTRSHHPHRATITTSIEHHSENNHDTTDALAALHALANNGTHPLLSRGLLTPQGPGKTVFVFPGQGSQYPGMGADLYRQFPVFAHALDACDAALQPFTGWSVLAVLHDEPEAPSLERVDVVQPVLFSVMVSLAALWRWAGITPDAVIGHSQGEIAAAHVAGALTLPEAAAVVALRSRVLTDLAGAGAMASVLSPEEPLTQLLARWDGKITVAAVNGPASAVVSGDTTAITELLITCEHENIDARAIPVDYPSHSPYMEHIRHQFLDELPELTPRPSTIAMYSTVDGEPHDTAYDTTTMTADYWYRNIRNTVRFHDTVAALLGAGEQVFLELSPHPVLTQAITDTVEQAGGGGAAVPALRKDRPDAVAFAAALGQLHCHGISPSWNVLYCQARPLTLPTYAFQHQRYWLLPTAGDFSGANTHAMHPLLDTATELAENRGWVFTGRISPRTQPWLNEHAVESAVLFPGTGFVELALHVADRAGYSSVNELIVHTPLLLAGHDTADLQITVTDTDDMGRQSLNIHSRPHIGHDNTTTGDEQPEWVLHASAVLTAQTTDHNHLPLTPVPWPPPGTAAIEVDDFYDDLAAQGYNYGPTFQGVQRIWRDHATPDVIYAEVELPEDTDIDGYGIHPALFDAALHPLLALTQPPTNDTDDTNTADTGDQVRLPYAFTGISLHATHATRLRVRLTRTGADAITVHTSDTTGAPVAIIDSLITRPLTTATGSAPATTAAGLLHLSWPPHPDTTTDTDTDTDALRYQVIAEPTQQLPRYLHDLHTSTDLHTSTTEADVVVWPVPVPSNEELQAHQASDTAVSSRIHTLTRQTLTVVQDWLTHPDTTGTRLVIVTRHGVSTSAHDPVPDLAHAAVWGLIRSAQNEHPGRFTLLDTDDNTNSDTLTTALTLPTRENQLAIRRDTIHIPRLTRTAVLTPPDSGPWRLDTTGKGDLANLALLPTAHTALASGQIRIDVRAAGLNFHDVVVALGLIPDDGFGGEAAGVISEIGPDVYGFAVGDAVTGMTVSGAFAPSTVADHRMVMTIPARWSFPQAASIPVVFLTAYIALAEISGLSRGQRVLIHAGTGGVGMAAIQLAHHLGAEVFATASAAKWSTLEALGVPRDHIASSRTLDFSNAFLDATNGAGVDVVLNCLSGEFVEASLALLPRGGHFVEIGKTDIRDTEVIAATHPGVIYRALDLLSVSPDHIQRTLAQLSPLFATDTLKPLPTTNYSIYQAISALRDMSQARHTGKIVLTAPVVVDPEGTVLITGGTGTLGALFAEHLVSAHGVRHLLLTSRRGPQAHGATDLQQRLTDLGAHVTITACDISDPEALAALVNSVPTQHRLTAVVHTAVVLADTPVTELTGDQLDQVLAPKIDAAWQLHQLTYEHNLSAFIMFSSMAGMIGSPGLGNYAAANTALDALADYRHRLGLPATSLAWGYWQTRTGLTAHLTDVDLARMTRLGLMPIATSHGLALFDAALATGQPVSIPAPINTHTLARHARDNTLAPILSALITTPRRRAASAATDLAARLNGLSPQQQQQTLATLVAAATATVLGHHTPESISPATAFKDLGIDSLTALELRNTLTHNTGLNLSSTLIFDHPTPHAVAEHLLEQIPGIGALVPAPVVIAAGRTEEPVAVVGMACRFPGGVASADQLWDLVIAGRDVVGNFPADRGWDVEGLFDPDPDAVGKTYTRYGAFLDDAAGFDAGFFGISPREARAMDPQQRLLLEVCWEALETAGIPAHTLAGTSTGVFVGAGAQSYGATNSDGAEGYAMTGGAISVMSGRIAYTLGLEGPAITVDTACSSSLVAIHLACQSLRNNESQLALAGGVTVMSTPAIFTEFSRQRGLAPDGRCKAFAATADGTGFGEGAAVLVLERLSEARRNNHPVLAIVAGSAINQDGASNGLTAPHGPSQQRVINQALANAGLTHDQVDAVEAHGTGTTLGDPIEASALHATYGHHHTPDQPLWLGSIKSNIGHTQAAAGAAGVVKMIQAITHATLPATLHVDQPSPHIDWSSGTVRLLTEPIQWPNTDHPRTAAVSSFGISGTNAHLILQQPPTPDTTQTPNTTTGSDPAVGSDSAVGSDPAVGVLVWPLSARSAPGLSAQAARLYQHLSAHPDLDPIDVAHSLATTRSHHPHRATITTSIEHHSENNHDTTDALAALHALANNGTHPLLSRGLLTPQGPGKTVFVFPGQGSQYPGMGADLYRQFPVFAHALDACDAALQPFTGWSVLAVLHDEPEAPSLERVDVVQPVLFSVMVSLAALWRWAGITPDAVIGHSQGEIAAAHVAGALTLPEAAAVVALRSRVLTDLAGAGAMASVLSPEEPLTQLLARWDGKITVAAVNGPASAVVSGDTTAITELLITCEHENIDARAIPVDYPSHSPYMEHIRHQFLDELPELTPRPSTIAMYSTVDGEPHDTAYDTTTMTADYWYRNIRNTVRFHDTVAALLGAGEQVFLELSPHPVLTQAITDTVEQAGGGGAAVPALRKDRPDAVAFAAALGQLHCHGISPSWNVLYCQARPLTLPTYAFQHQRYWLLPTAGDFSGANTHAMHPLLDTATELAENRGWVFTGRISPRTQPWLNEHAVESAVLFPGTGFVELALHVADRAGYSSVNELIVHTPLLLAGHDTADLQITVTDTDDMGRQSLNIHSRPHIGHDNTTTGDEQPEWVLHASAVLTAQTTDHNHLPLTPVPWPPPGTAAIEVDDFYDDLAAQGYNYGPTFQGVQRIWRDHATPDVIYAEVELPEDTDIDGYGIHPALFDAALHPLLALTQPPTNDTDDTNTADTGDQVRLPYAFTGISLHATHATRLRVRLTRTGADAITVHTSDTTGAPVAIIDSLITRPLTTATGSAPATTAAGLLHLSWPPHPDTTTDTDTDTDALRYRVIAEPTQQLPRYLHDLHTSTDLHTSTTEADVVVWPVPVPSNEELQAHQASDTAVSSRIHTLTRQTLTVVQDWLTHPDTTGTRLVIVTRHGVSTSAHDPVPDLAHAAVWGLIRSAQNEHPGRFTLLDTDDNTNSDTLTTALTLPTRENQLAIRRDTIHIPRLTRHSSDGALTAPVVVDPEGTVLITGGTGTLGALFAEHLVSAHGVRHLLLTSRRGPQAHGATDLQQRLTDLGAHVTITACDISDPEALAALVNSVPTQHRLTAVVHTAAVLADTPVTELTGDQLDQVLAPKIDAAWQLHQLTYEHNLSAFIMFSSMAGMIGSPGQGNYAAANTALDALADYRHRLGLPATSLAWGYWQTHTGLTAHLTDVDLARMTRLGLMPIATSHGLALFDAALATGQPVSIPAPINTHTLARHARDNTLAPILSALITTPRRRAASAATDLAARLNGLSPQQQQQTLATLVAAATATVLGHHTPESISPATAFKDLGIDSLTALELRNTLTHNTGLDLPPTLIFDHPTPTALTQHLHTRLTTGALVPAPVVIAAGRTEEPVAVVGMACRFPGGVASADQLWDLVIAGRDVVGNFPADRGWDVEGLFDPDPDAVGKTYTRYGAFLDDAAGFDAGFFGISPREARAMDPQQRLLLEVCWEALETAGIPAHTLAGTSTGVFVGAWAQSYGATNSDDAEGYAMTGGAISVMSGRIAYTLGLEGPAITVDTACSSSLVAIHLACQSLRNNESQLALAGGVTVMSTPAVFTDFSRQRGLAPDGRCKAFAATADGTGFGEGAAVLVLERLSEARRNNHPVLAIVAGSAINQDGASNGLTAPHGPSQQRVINQALANAGLTHDQVDAVEAHGTGTTLGDPIEAGALHATYGHHHTPDQPLWLGSIKSNIGHTQAAAGAAGVVKMIQAITHATLPATLHVDQPSPHIDWSSGTVRLLTEPIQWPNTDHPRTAAVSSFGISGTNAHLILQQPPTPDTTQTPNTTTGSDPAVGSDPAVGVLVWPLSARSAPGLSAQAARLYQHLSAHPDLDPIDVAHSLATTRSHHPHRATITTSIEHHSENNHDTTDALAALHALANNGTHPLLSRGLLTPQGPGKTVFVFPGQGSQYPGMGADLYRQFPVFAHALDACDAALQPFTGWSVLAVLHDEPEAPSLERVDVVQPVLFSVMVSLAALWRWAGITPDAVIGHSQGEIAAAHVAGALTLPEAAAVVALRSRVLTDLAGAGAMASVLSPEEPLTQLLARWDGKITVAAVNGPASAVVSGDTTAITELLITCEHENIDARAIPVDYPSHSPYMEHIRHQFLDELPELTPRPSTIAMYSTVDGEPHDTAYDTTTMTADYWYRNIRNTVRFHDTVAALLGAGEQVFLELSPHPVLTQAITDTVEQAGGGGAAVPALRKDRPDAVAFAAALGQLHCHGISPSWNVLYCQARPLTLPTYAFQHQRYWLLPTAGDFSGANTHAMHPLLDTATELAENRGWVFTGRISPRTQPWLNEHAVESAVLFPGTGFVELALHVADRAGYSSVNELIVHTPLLLAGHDTADLQITVTDTDDMGRQSLNIHSHPHIGHDNTTTGDEQPEWVLHASAVLTAQTTDHNHLPLTPVPWPPPGTAAIEVDDFYDDLAAQGYNYGPTFQGVQRIWRDHATPDVIYAEVELPEDTDIDGYGIHPALFDAALHPLLALTQPPTNDTDDTNTADTGDQVRLPYAFTGISLHATHATRLRVRLTRTGADAITVHTSDTTGAPVAIIDSLITRPLTTATGSAPATTAAGLLHLSWPPHPDTTTDTDTDTDALRYQVIAEPTQQLPRYLHDLHTSTDLHTSTTEADVVVWPVPVPSNEELQAHQASDTAVSSRIHTLTRQTLTVVQDWLTHPDTTGTRLVIVTRHGVSTSAHDPVPDLAHAAVWGLIRSAQNEHPGRFTLLDTDDNTNSDTLTTALTLPTRENQLAIRRDTIHIPRLTRTAVLTPPDSGPWRLDTTGKGDLANLALLPTAHTALASGQIRIDVRAAGLNFHDVVVALGLIPDDGFGGEAAGVISEIGPDVYGFAVGDAVTGMTVSGAFAPSTVADHRMVMTIPARWSFPQAASIPVVFLTAYIALAEISGLSRGQRVLIHAGTGGVGMAAIQLAHHLGAEVFATASAAKWSTLEALGVPRDHIASSRTLDFSNAFLDATNGAGVDVVLNCLSGEFVEASLALLPRGGHFVEIGKTDIRDTEVIAATHPGVIYRALDLLSVSPDHIQRTLAQLSPLFATDTLKPLPTTNYSIYQAISALRDMSQARHTGKIVLTAPVVVDPEGTVLITGGTGTLGALFAEHLVSAHGVRHLLLTSRRGPQAHGATDLQQRLTDLGAHVTITACDISDPEALAALVNSVPTQHRLTAVVHTAAVLADTPVTELTGDQLDQVLAPKIDAAWQLHQLTYEHNLSAFIMFSSMAGMIGSPGQGNYAAANTALDALADYRHRLGLPATSLAWGYWQTHTGLTAHLTDVDLARMTRLGLMPIATSHGLALFDAALATGQPVSIPAPINTHTLARHARDNTLAPILSALITTPRRRAASAATDLAARLNGLSPQQQQQTLATLVAAATATVLGHHTPESISPATAFKDLGIDSLTALELRNTLTHNTGLNLSSTLIFDHPTPHAVAEHLLEQIPGIGALVPAPVVIAAGRTEEPVAVVGMACRFPGGVASADQLWDLVIAGRDVVGNFPADRGWDVEGLFDPDPDAVGKTYTRYGAFLDDAAGFDAGFFGISPREARAMDPQQRLLLEVCWEALETAGIPAHTLAGTSTGVFVGAGAQSYGATNSDDAEGYAMTGGATSVMSGRIAYTLGLEGPAITVDTACSSSLVAIHLACQSLRNNESQLALAGGVTVMSTPAVFTEFSRQRGLAPDGRCKAFAATADGTGFGEGAAVLVLERLSEARRNNHPVLAIVAGSAINQDGASNGLTAPHGPSQQRVINQALANAGLTHDQVDAVEAHGTGTTLGDPIEAGALHATYGHHHTPDQPLWLGSIKSNIGHTQAAAGAAGVVKMIQAITHATLPATLHVDQPSPHIDWSSGTVRLLTEPIQWPNTDHPRTAAVSSFGISGTNAHLILQQPPTPNPTQTPEDCSPAQSPCATITDAGTGLSFVPWVISAKSAEALSAQASRLLTRLDDDPVVDAIDLGWSLIATRSMFEHRAVVVGADRHQLQRGLAELASGNLGADVVVGRARAAGETVMVFPGQGSQRLGMGAQLYEQFPVFAAAFDDVVDALDQYLRLPLRQVMWGDDEGLLNSTEFAQPSLFAVEVALFALLRFWGVVPDYVIGHSVGELAAAQVAGVLSLQDAAKLVSARGRLMQALPAGGAMVAVAASQHEVEPLLVEGVDIAALNAPGSVVISGDQAAVRLIANRLADRGYRAHELAVSHAFHSSLMEPMLEEFARLASEIVVEQPQIPLISNVTGQLANADYGSAGYWVDHIRRPVRFADSVASLEAMGASCFIEVGPASGLGAAIEQSLKSAEPTVSVSALSTDKPESVAVLRAAARLSTSGIPVDWQSVFDGRSTQTVNLPTYAFQRQRFWLDANRIGQGDPASQPQAQNVESRFWEAVEREDVDGLADSIGVTASAMQTVLPALSSWRRAERTQSELDSWRYQVTWLSSPATPSSITLSGIWLLIVPSELAKTDPVIGCAAALEAHGALVTIITIFEPDFNRSLMGASLKDIGSHISGVISFLGIHGSEFSDSGAVKTLNLVQAMGDVHLDVPLWCLTQGAVSISADDLIRCSSAALVWGLGRVVALEHPGSWGGLVDLPESPDDAAWERLCALLAQPTDEDQFAIRPSGVFLRRLIHAPATTTSKSSTAWAPRGTVLITGGTGALGAHVARWLAHKYESVDLLLTSRRGMAADGATELVDDLRTAGASVTVHACDVTDRTSVEAAIAGKSLDAVFHLAGRHQPTLLTELEDESFSDELAPKVHGAQVLSDITSNLTLSAFVMFSSVAGIWGGKSQGAYAAANAFLDSLAEKRRTLGLPATSVAWGLWAGGGMGDRPSASGLNLIGLKSMSADLAVQALSDAIDRPQATLTVASVNWDRFYPTFALARPRPFLHEITEVMAYRESMRSSSASTATLLTSKLAGLTATEQRAVTRKLVLDQAASVLGYASTESLDTHESFKDLGFDSLTALELRDHLQTATGLNLSSTLIFDHPTPHAVAEHLLEQIPGIGALVPAPVVIAAGRTEEPVAVVGMACRFPGGVASADQLWDLVIAGRDVVGNFPADRGWDVEGLFDPDPDAVGKTYTRYGAFLDDAAGFDAGFFGISPREARAMDPQQRLLLEVCWEALETAGIPAHTLAGTSTGVFAGAWAQSYGATNSDDAEGYAMTGGSTSVMSGRIAYTLGLEGPAITVDTACSSSLVAIHLACQSLRNNESQLALAGGVTVMSTPAIFTEFSRQRGLAPDGRCKAFAATADGTGFGEGAAVLVLERLSEARRNNHPVLAIVAGSAINQDGASNGLTAPHGPSQQRVINQALANAGLTHDQVDAVEAHGTGTTLGDPIEASALHATYGHHHTPDQPLWLGSIKSNIGHTQAAAGAAGVVKMIQAITHATLPATLHVDQPSPHIDWSSGTVRLLTEPIQWPNTDHPRTAAVSSFGISGTNAHLILQQPPTPDTTQTPNTTTGSDPAVGSDPAVGVLVWPLSARSAPGLSAQAARLYQHLSAHPDLDPIDVAHSLATTRSHHPHRATITTSIEHHSENNHDTTDALAALHALANNGTHPLLSRGLLTPQGPGKTVFVFPGQGSQYPGMGADLYRQFPVFAHALDACDAALQPFTGWSVLAVLHDEPEAPSLERVDVVQPVLFSVMVSLAALWRWAGITPDAVIGHSQGEIAAAHVAGALTLPEAAAVVALRSRVLTDLAGAGAMASVLSPEEPLTQLLARWDGKITVAAVNGPASAVVSGDTTAITELLITCEHENIDARAIPVDYPSHSPYMEHIRHQFLDELPELTPRPSTIAMYSTVDGEPHDTAYDTTTMTADYWYRNIRNTVRFHDTVAALLGAGEQVFLELSPHPVLTQAITDTVEQAGGGGAAVPALRKDRPDAVAFAAALGQLHCHGISPSWNVLYCQARPLTLPTYAFQHQRYWLLPTAGDFSGANTHAMHPLLDTATELAENRGWVFTGRISPRTQPWLNEHAVESAVLFPGTGFVELALHVADRAGYSSVNELIVHTPLLLAGHDTADLQITVTDTDDMGRQSLNIHSHPHIGHDNTTTGDEQPEWVLHASAVLTAQTTDHNHLPLTPVPWPPPGTAAIEVDDFYDDLAAQGYNYGPTFQGVQRIWRDHATPDVIYAEVELPEDTDIDGYGIHPALFDAALHPLLALTQPPTNDTDDTNTADTGDQVRLPYAFTGISLHATHATRLRVRLTRTGADAITVHTSDTTGAPVAIIDSLITRPLTTATGSAPATTAAGLLHLSWPPHPDTTTDTDTDTDALRYQVIAEPTQQLPRYLHDLHTSTTEADVVVWPVPVPSNEELQAHQASDTAVSSRIHTLTRQTLTVVQDWLTHPDTTGTRLVIVTRHGVSTSAHDPVPDLAHAAVWGLIRSAQNEHPGRFTLLDTDDNTNSDTLTTALTLPTRENQLAIRRDTIHIPRLTRHSSDGALTAPVVVDPEGTVLITGGTGTLGALFAEHLVSAHGVRHLLLTSRRGPQAHGATDLQQRLTDLGAHVTITACDISDPEALAALVNSVPTQHRLTAVVHTAAVLADTPVTELTGDQLDQVLAPKIDAAWQLHQLTYEHNLSAFIMFSSMAGMIGSPGQGNYAAANTALDALADYRHRLGLPATSLAWGYWQTHTGLTAHLTDVDLARMTRLGLMPIATSHGLALFDAALATGQPVSIPAPINTHTLARHARDNTLAPILSALITTPRRRAASAATDLAARLNGLSPQQQQQTLATLVAAATATVLGHHTPESISPATAFKDLGIDSLTALELRNTLTHNTGLDLPPTLIFDHPTPHAVAEHLLEQIPGIGALVPAPVVIAAGRTEEPVAVVGMACRFPGGVASADQLWDLVIAGRDVVGNFPADRGWDVEGLFDPDPDAVGKTYTRYGAFLDDAAGFDAGFFGISPREARAMDPQQRLLLEVCWEALETAGIPAHTLAGTSTGVFAGAWAQSYGATNSDDAEGYAMTGGSTSVMSGRIAYTLGLEGPAITVDTACSSSLVAIHLACQSLRNNESQLALAGGVTVMSTPAVFTEFSRQRGLAPDGRCKAFAATADGTGFGEGAAVLVLERLSEARRNNHPVLAIVAGSAINQDGASNGLTAPHGPSQQRVINQALANAGLTHDQVDAVEAHGTGTTLGDPIEASALHATYGHHHTPDQPLWLGSIKSNIGHTQAAAGAAGVVKMIQAITHATLPATLHVDQPSPHIDWSSGTVRLLTEPIQWPNTDHPRTAAVSSFGISGTNAHLILQQPPTPDTTQTPNTTTGSDPAVGSDPAVGVLVWPLSARSAPGLSAQAARLYQHLSAHPDLDPIDVAHSLATTRSHHPHRATITTSIEHHSENNHDTTDALAALHALANNGTHPLLSRGLLTPQGPGKTVFVFPGQGSQYPGMGADLYRQFPVFAHALDACDAALQPFTGWSVLAVLHDEPEAPSLERVDVVQPVLFSVMVSLAALWRWAGITPDAVIGHSQGEIAAAHVAGALTLPEAAAVVALRSRVLTDLAGAGAMASVLSPEEPLTQLLARWDGKITVAAVNGPASAVVSGDTTAITELLITCEHENIDARAIPVDYPSHSPYMEHIRHQFLDELPELTPRPSTIAMYSTVDGEPHDTAYDTTTMTADYWYRNIRNTVRFHDTVAALLGAGEQVFLELSPHPVLTQAITDTVEQAGGGGAAVPALRKDRPDAVAFAAALGQLHCHGISPSWNVLYCQARPLTLPTYAFQHQRYWLLPTAGDFSGANTHAMHPLLDTATELAENRGWVFTGRISPRTQPWLNEHAVESAVLFPGTGFVELALHVADRAGYSSVNELIVHTPLLLAGHDTADLQITVTDTDDMGRQSLNIHSRPHIGHDNTTTGDEQPEWVLHASAVLTAQTTDHNHLPLTPVPWPPPGTAAIEVDDFYDDLAAQGYNYGPTFQGVQRIWRDHATPDVIYAEVELPEDTDIDGYGIHPALFDAALHPLLALTQPPTNDTDDTNTADTGDQVRLPYAFTGISLHATHATRLRVRLTRTGADAITVHTSDTTGAPVAIIDSLITRPLTTATGSAPATTAAGLLHLSWPPHPDTTTDTDTDTDALRYQVIAEPTQQLPRYLHDLHTSTDLHTSTTEADVVVWPVPVPSNEELQAHQASDTAVSSRIHTLTRQTLTVVQDWLTHPDTTGTRLVIVTRHGVSTSAHDPVPDLAHAAVWGLIRSAQNEHPGRFTLLDTDDNTNSDTLTTALTLPTRENQLAIRRDTIHIPRLTRTAVLTPPDSGPWRLDTTGKGDLANLALLPTAHTALASGQIRIDVRAAGLNFHDVVVALGLIPDDGFGGEAAGVISEIGPDVYGFAVGDAVTGMTVSGAFAPSTVADHRMVMTIPARWSFPQAASIPVVFLTAYIALAEISGLSRGQRVLIHAGTGGVGMAAIQLAHHLGAEVFATASAAKWSTLEALGVPRDHIASSRTLDFSNAFLDATNGAGVDVVLNCLSGEFVEASLALLPRGGHFVEIGKTDIRDTEVIAATHPGVIYRALDLLSVSPDHIQRTLAQLSPLFATDTLKPLPTTNYSIYQAISALRDMSQARHTGKIVLTAPVVVDPEGTVLITGGTGTLGALFAEHLVSAHGVRHLLLTSRRGPQAHGATDLQQRLTDLGAHVTITACDISDPEALAALVNSVPTQHRLTAVVHTAAVLADTPVTELTGDQLDQVLAPKIDAAWQLHQLTYEHNLSAFIMFSSMAGMIGSPGQGNYAAANTALDALADYRHRLGLPATSLAWGYWQTRTGVTAHLTDVDLARMTRLGLMPIATSHGLALFDAALATGQPVSIPAPINTHTLARHARDNTLTPILSALITTPRRRAASAATDLAARLNGLSPQQQQQTLATLVAAATATVLGHHTPESISPATAFKDLGIDSLTALELRNTLTHNTGLDLPPTLIFDHPTPTALTQHLHTRLTTGALVPAPVVIAAGRTEEPVAVVGMACRFPGGVASADQLWDLVIAGRDVVGNFPADRGWDVAGLFDPDPDAVGKTYTRYGAFLDDAAGFDAGFFGISPREARAMDPQQRLLLEVCWEALETAGIPAHTLAGTSTGVFVGAGAQSYGATNSDDAEGYAMTGGAISVMSGRIAYTLGLEGPAITVDTACSSSLVAIHLACQSLRNNESQLALAGGVTVMSTPAVFTDFSRQRGLAPDGRCKAFAATADGTGFGEGAAVLVLERLSEARRNNHPVLAIVAGSAINQDGASNGLTAPHGPSQQRVINQALANAGLTHDQVDAVEAHGTGTTLGDPIEAGALHATYGHHHTPDQPLWLGSIKSNIGHTQAAAGAAGVVKMIQAITHATLPATLHVDQPSPHIDWSSGTVRLLTEPIQWPNTDHPRTAAVSSFGISGTNAHLILQQPPTPDTTQTPNPTTGSDPAVGSDSAVGSDPAVGVLVWPLSARSAPGLSAQAARLYQHLSAHPDLDPIDVAHSLATTRSHHPHRATITTSIEHHSENNHDTTDALAALHALANNGTHPLLSRGLLTPQGPGKTVFVFPGQGSQYPGMGADLYRQFPVFAHALDEVAAALNPHLDVALLEVMFSQQDTAMAQLLDQTFYAQPALFALGTALHRLFTHAGIHPDYLLGHSIGELTAAYAAGVLSLQDAATLVTSRGRLMQSCTPGGTMLALQASEAEVQPLLEGLDHAVSIAAINGATSIVLSGDHDSLEQIGEHFITQDRRTTRLQVSHAFHSPHMDPILEQFRQIAAQLTFSAPTLPILSNLTGQIARHDQLASPDYWTQQLRNTVRFHDTVAALLGAGEQVFLELSPHPVLTQAITDTVEQAGGGGAAVPALRKDRPDAVAFAAALGQLHCHGISPSWNVLYCQARPLTLPTYAFQHQRYWLLPTAGDFSGANTHAMHPLLDTATELAENRGWVFTGRISPRTQPWLNEHAVESAVLFPNTGFVELALHVADRAGYSSVNELIVHTPLLLAGHDTADLQITVTDTDDMGRQSLNIHSRPHIGHDNTTTGDEQPEWVLHASAVLTAQTTDHNHLPLTPVPWPPPGTAAIEVDDFYDDLAAQGYNYGPTFQGVQRIWRDHATPDVIYAEVELPEDTDIDGYGIHPALFDAALHPLLALTQPPTNDTDDTNTADTGDQVRLPYAFTGISLHATHATRLRVRLTRTGADAITVHTSDTTGAPVAIIDSLITRPLTTATGSAPATTAAGLLHLSWPPHPDTTTDTDTDTDTDALRYQVIAEPTQQLPRYLHDLHTSTDLHTSTTEADVVVWPVPVPSNEELQAHQASDTAVSSRIHTLTRQTLTVVQDWLTHPDTTGTRLVIVTRHGVSTSAHDPVPDLAHAAVWGLIRSAQNEHPGRFTLLDTDDNTNSDTLTTALTLPTRENQLAIRRDTIHIPRLTRHSSDGALTAPVVVDPEGTVLITGGTGTLGALFAEHLVSAHGVRHLLLTSRRGPQAHGATDLQQRLTDLGAHVTITACDISDPEALAALVNSVPTQHRLTAVVHTAAVLADTPVTELTGDQLDQVLAPKIDAAWQLHQLTYEHNLSAFIMFSSMAGMIGSPGQGNYAAANTALDALADYRHRLGLPATSLAWGYWQTHTGLTAHLTDVDLARMTRLGLMPIATSHGLALFDAALATGQPVSIPAPINTHTLARHARDNTLAPILSALITTPRRRAASAATDLAARLNGLSPQQQQQTLATLVAAATATVLGHHTPESISPATAFKDLGIDSLTALELRNTLTHNTGLDLPPTLIFDHPTPTALTQHLHTRLTQIESPNSEDSMLNLKNLDRIESYIFRNSGEDRAHVIANRLRSILSKWDGTRSPELPAELHLESATDDELFSLANMFRTPTSEISPTLEGGRGVN

SEQ ID NO: 51042 - protein, 409 aa, Arachis hypogaea
MALRLNPNPSQKLFLSPSSSSSSSSSSFSLPQMASLRSPRFRMASTLRTGSKEVENLKKPFTPPREVHVQGNHSMPPQKIEIFKSLEGWAEENILTLLKPVEKCWQPQDYLPEPSEDGFEEQVRELRARAKELPDDYFVVLVGDMITEEALPTYQTMLNTLDGVRDETGASLTSWAVWTRAWTAEENRHGDLLNKYLYLSGRVDLRQIEKTIQYLIGSGMDPRTENSPYLGFIYTSFQERATFISHGNTARLAKGHGDMKLAQICGMIASDEKRHETAYTKIVEKLFEIDPDGTVMAFADMMRKKIAMPAHLMYDGRDDNLFENYSAVAQRIGVYTAKDYADILEFLVARWKVADLTGLSGEGRKAQDYVCRCRPRIRRIRRLEERAQGRAKESPRLKFSWIYDREVQL

SEQ ID NO: 51043 - protein, 162 aa, Triticum aestivum
  misc_feature (7)..(7): Xaa can be any naturally occurring amino acid
  misc_feature (30)..(30): Xaa can be any naturally occurring amino acid
  misc_feature (45)..(45): Xaa can be any naturally occurring amino acid
  misc_feature (74)..(74): Xaa can be any naturally occurring amino acid
  misc_feature (99)..(99): Xaa can be any naturally occurring amino acid
  unsure (1)..(162): unsure at all Xaa locations
GTPGRLXQENVQGRHWKDRKERNITDRMLXRLTEDTQKPDKDGLXVEEAYIADLWVYDDINEYLQASNYDPPAXERIKEVMKEPDIDMDGLLHREELEXFIRKLTVESLCWIKLKMIITLITGPAMSLETNREAEVVPGVNKVEHKAPNAIYVDDISMAAVV

SEQ ID NO: 51044 - protein, 904 aa, Silicibacter sp. TM1040
MSDLDASWILVCALLVLLLQAGFLCLEAGTVRAKNSANVALKNLSDVCIVSTCFWLVGFGLMFGESFNGLFGTTQFWLALDNDSGHAASIFLFQMAFAASAATIVSGAVAERERFLGYMVVSVALSALVYPVVGHWIWNQAGWLRQMGFVDFAGATVVHSVGGWTALVTIIILGPRLGRYGPKKRRFDEYSISLVTLGGLLLWVGWGAFNGGSAMAFGTGVGPIIARTMLLAAGAGVASIAIGLGLFRHVRAELLVNGFLGGLVAGTAGVHLMTGTVAFGIGALGAVTVIIARDILDALKIDDVVGAVPVHLAAGLIGTLSIAFTAPVDLLPAGSRLAQLGIQALGITAVGGWVVCSMAPLILLLRARGLLRVHPKDEVRGLNLTENNQRNALMDLLAEMKRHQRSGSFSRRVRIDRSTEYGVLAYRYNRVLDRVEAEINARVDSIRKERMSRLLAEEAFESMREAQEENAWSARHDKLTGLGNRKYLEEVAVETSTGPLGATLLIAIDLDRFKEINDTYGHEAGDVVLEHTAQRLSEKIRTGRDFAFRIGGDEFVVLMEFAGTQDDAFEYCSDLLFELLQPVRYKATDLQVGASIGFALCKPPETLGAALRRADLALYASKADGRSCVNAYSASIGSAHDEKMNLIRDFKQAFANNEIEVTLQPQIDGKTMEIAGCEALARWHHPVRGIVSPDVFVPVAKEVNMLADLDRRILDLALAAYWNFASHGIALPSLSVNVSAERLGHPDLIKELQQREDLPPDGLAFELLETVFLDQLTENYANQIAALKAMGIAIEIDDFGTGHASIAGVLALKPDRLKIDRMFTSGIDEKPARRDLMRGLIEMAASAGAETVVEGVETEAQAQVLSELGADVLQGFAFARPMDQERFLLWAQDWNAARQMPKTG

SEQ ID NO: 51045 - protein, 540 aa, Lactococcus lactis subsp. lactis Il1403
MRAHEILNNPFLNKGTAFTMKERQELGLIGLLPPTVQTIEEQAEQTYEQYLTKPSDLEKRHFLMEIFNTNRTLFYYLFNKHIVEFNPVVYDPTIADTIENYSHLFVDPQYAAYLDINHPENITETLKNAAGDREIRLIVVTDAEGILGIGDWGTQGVDISVGKLMIYTAAAGIDPASVLPVVIDAGTNRKELLEDHLYLGNHQERIYGDQYYSFVDQFVETAESIFPKLYLHWEDFGRSNAATILNNYKTKIPTFNDDIQGTGIVVLGGIFGSLDITGEKLTDQVYLCYGGGSAGAGIAGRVHAEMVSEGLSEEEAYKHFFMIDQQGLLFDDMEDLTPAQKPFAKKRADYKDAGDMTDLLNVVKTVKPTILVGTSTNPGAFTKEVVEAMCANTERPVIFPISNPTKKMETTAEQVIEWSDGKAFVATGVPSGTISYKGVDYQIGQANNSLIYPGLGLGMLASEAKLLTDEMIGAAAHSLSGLVDPGKPGAPVLPPFEFVADVSIKVAEAVAKKAQEQGLTESKETDMAKAVRDLKWYPEY

SEQ ID NO: 51046 - protein, 429 aa, Pirellula sp. 1
MTDASSTPSYDPSMSRRVVITGLGTVTPLGCDVETLWSALLAGKSGIHELSIMDTSKYKVHFGGDIPDFNVADHVEPKEAKRLDRFTQFAVHAGAQAVQDSGIDWEKTDRTRCGVILGSGIGGLNEIEEQIERMLNKGPDRVSPFTVPKMMVNAAGGNISIRYGLKGPNYAVATACASATNAMGDALRSIRGGETDVVITGGTEAAITRMGLAAFQNMKALSTRNDEPQRASRPFDSDRDGFVLAEGAGLLVFEELEHAKARGAKIYAEVLGYGTTSDAGHITAPDPEGLGAAAAMRAAIQDSGRAASEIDYINAHGTSTPLGDKAETRAIHTVLGDHAQNVAISSTKSALGHSLGASGGIEAVILCQTIQNNVIAPTINLDTPDPSCDLDYVPNQPREQKVDLAMSNSFGFGGHNACVLFGRFSHDGS

SEQ ID NO: 51047 - protein, 416 aa, Nicotiana tabacum
MAGMCCGVNLAETEATTPVEPSSEAARRRRMEIHQFRLAPPLENGTKRHKVEKVVDQSKRRKLETSVTISLTSPLSVTEKVVEKEFEAKPLDLLESDVSSVKIERPEVVSGNNNPPKFGTTSVCGRRRDMEDAVAVHPSFCKEENENSNSLHFYGVYDGHGCSHVAMKCKDRMHEIVKNEVEKGETQWKEVMTQSFSQMDNEVVHYSSGALGGSRSNCRCELQTPQCDAVGSTAVVAVVTPEKIIVSNCGDSRAVLCRNGVAIPLSIDHKPDRPDELNRIQEAGGRVIYWDGPRVLGVLAMSRAIGDNYLKPYVISEPEVTITERTEEDECLILASDGLWDVVSNETACGVARMCLQSRKPPSPHGSPENDVTVTGAGESSDQLCSDASILLTKLALARHSTDNVSVVVVDLRKDL

SEQ ID NO: 51048 - protein, 176 aa, Triticum aestivum
  misc_feature (127)..(127): Xaa can be any naturally occurring amino acid
  unsure (1)..(176): unsure at all Xaa locations
MAPTVMASSDTSVAPFQGLKSTAGLPVSRRSNGASLGSVRNGGRIRCMQVWPIEGVKKWDTLSYLPPLSTEALLKQVDYLIRSKWVPCLEFSKVGFIFREHNASPGYYDGRYWTMWKLPMFGCTDAXTQVINEVEEVKKEYPEAYVRIIGFDNMRQVQCVSFIAFKPPGCEESGKA

SEQ ID NO: 51049 - protein, 471 aa, Gluconobacter oxydans 621H
MTTSPAPDHTPTHAGAISEEGYHKDLGRRHVQMIAIGGAIGTGLFLGAGSRLQVAGPSLAIIYAICGVFSFLILRALGELVMYRPTSGSFVTYAREFLGERAAYMAGWLSFLNWAMTGIVDITAVALYMHYWAVFLPVPQWAFALAALAIVGTMNMIGVRYFGEMEFWFSLIKVVALALFLIAGATILGTRMPVAGHTTGFHLITENGGIFPHGLFSALMLLQGVVFAYSGIELLGTAAGECEDAREILPRAINSVIWRIALFYVGSVILLVCLLPWTEYHAGTSPFVTFFQALGIPGIGTIMNIVVLTAALSSLNSGLYSTGRVLRALALGGSGPKALGKLNRSSVPYVGILTTLGVYLVGVMLNYLIPSRVFEIVLNFSALGIISTWGFILLCQLRLRAAINRGDIAPTGFNMPGAPYTTWATLGFLGFVLIMMAFDYPDGTITIGAIPLIGAILIGGWRLLDRGRRHG

SEQ ID NO: 51050 - protein, 346 aa, Caulobacter crescentus CB15
MKALRYHGARDVRYESMDDPTPQSDRDAIVQVTACSICGSDLHIYHGHGFSEDLGFCVGHEAVGEVVEVGRGVQRLKVGDKVMLPAAVGCGRCRSCLSGVIQTCENGQGACYGLSARLQGSQAEAVRVPAADMNAVPVPDGVSMDQALMMTDALATAWFGARNAEVRPGASVAVIGLGPIGLMAVESAYVMGAHVVYAIDPLPARRALAEEAGAIALHPDEALARVREDTKGRGLDCVIEAVGGEATVDAALRLVRPRGVVSVIGVQQAKRFAFPLERAFGAGLTFRVGTCSVPEELPALFPLVRSGRLRPEKYISHRLPLSDGPEAYRLFESREAGALKMVLTPG

SEQ ID NO: 51051 - protein, 324 aa, Bradyrhizobium sp. BTAi1
MTSAIRFHKTGGPEVLVWEDVTVGKPGPGEARIRHTAVGLNFVDIYNRSGLYPVQLPSGLGSEGAGVVEELGEGVTDLKVGDRVAYGSSPLGAYSEARLIPAAQLLKLPDGIDDKTAAAMMLKGLTVQYLIRQTYRVKAGETILLHAAAGGVGLILSQWAKHLGASVIGTVSSDEKAEQARAHGCDHTIVYSREDFVARVGEITAGRKVPVVYDSVGKDTFLKSLDCLAPLGYAVLFGQSSGTVDPLNLGLLAQKGSLFVTRPTLFTYAAKRENLVAMANELFDVVKSGAVRIEVNQTYPLKDAAKAHADLAARKTTGSTVFLV

SEQ ID NO: 51052 - protein, 438 aa, Exiguobacterium sp. 255-15
MQTHRPVLDVQERPKHPLQWLMLSLQHVFAMFGATVLVPLLTGLNTSVALVASGVGTLIFLAVTRFKVPTYLGSSFAYIVPIIAVSERWGVEDALVGGMVAGLVYGIVSLVITYTGVGWLMKLLPPIVIGPVIMVIGLSLAPTAVNMAMNGADGKYNGTFLLVALTTLAVTLLAMTYFKGMWSTVPILFGILTGYLVAVAAGIVDFTSLKQASFFQVPNFTVPFLDYSPTLNWAALALIVPVTLVTLTEHIGEQKVTSRIIGRETLLDPGMHRTVLGDGLAKTIASILGGPPVTTYGENNGVMAITRVYSVFVLGGAAVLAISFGFLGYVEGFIKTIPTPVMGGISILLFGVIASNGLRTLVESKVDLADKRNLTITAVILVIGIGGAALKIGNFSLEGMALATILGVLLNLILPKTSIEVAAHEQETPQPKRAANDF

SEQ ID NO: 51053 - protein, 154 aa, Streptococcus pyogenes M49 591
RPPSDSARILSVRSGYTGGHLPNPSYEQVCAKTTGHTEAVEIIFDPKQIAYKDLVELYWAQTDPTDAFGQFEDRGDNYRPVIYYTTERQKEIAEQSKANLQASGRFDQPIVTTIEPAEPFYLAEDYHQGFYKKNPKRYAQSSAIRHQFLEENWS

SEQ ID NO: 51054 - protein, 420 aa, Mannheimia succiniciproducens MBEL55E
MQITILVSIKEKLISKHNISKESPMFKNITPAPADPILGLGEAFKAETRENKINLGIGVYKDADGVTPIMTAVKKAEGQLFENEKDKNYLPIEGVAEYNAYAKELLFGKDSEIIASNRACTVQTLGGTGALRIAAEFVRRQTKAQNVWISKPTWPNHNAIFNAVGVTIREYRWYNPETKALDWDNLLADLNNANPGDVVLLHGCCHNPTGIDPTPEQWKALAEMSAKNGWLPLFDFAYQGLANGLEEDAVGLRTFAETHRELLVASSFSKNFGLYSERVGAFTLVADNADVAAVALTQIKSIIRTLYSNPSAHGARTVATVLANPELRKEWEDELTSMRDRIKQMRKQLVELLKEFGAQEDFSYIIDQKGMFSFSGLTAEQVDRLKEEFAIYAVRSGRINVAGITEANIRYLAESIVKVL

SEQ ID NO: 51055 - protein, 126 aa, Neurospora crassa
MLGQITTKELGTVMRSLGQNPSESELQDMINEVDADNNGTIDFPEFLTMMARKMKDTDSEEEIREAFKVFDRDNNGFISAAELRHVMTSIGEKLTDDEVDEMIREADQDGDGRIDYNEFVQLMMQK

SEQ ID NO: 51056 - protein, 489 aa, Magnetospirillum magnetotacticum MS-1
MILKDSSLLKSRAFVNGAWTDADNGATFDVLNPATGEILASVPDMGAAEARRAIEAANAAWPAWKAKTGKERGAILRNWFNLIMAHQEDLAVLLTAEQGKPLAEARGEIAYGASFIEWFAEEAKRVYGDTIPGHAPDKRIVVVKEPIGVVAAITPWNFPNAMITRKCAPALAVGCPVVVKPAEDTPLSALALAELAVRAGIPAGIFNIVTARHGALVGGELSGNPLVRKLSFTGSTQVGKLLMSQCAATVKKVSLELGGNAPFIVFDDADLDAAVAGAMASKYRNAGQTCVCANRMLVQDGVYDEFARRLAKAVSQLKVGDGLASDANQGPLINAKAVEKVERMLADAVSKGATIVCGGKRHALGRTFFEPTIVTNVTSTMSMAREEIFGPVAPLFRFKTEAEAIAMANDTEFGLAAYFYAGNIARVWRVAEKLEYGMVGINDGIISTEVAPFGGVKESGIGREGSKYGIEDFLEIKYLCLGGIKEAAQ

SEQ ID NO: 51057 - protein, 492 aa, Debaryomyces hansenii CBS767
MSKPTLNNPDLIRTKPYINGEWFESKSTKTFKVIDPATETEIVELPDQTPEEIAFAIEKAEEAFKTFKKTNAYDRARWLRKLNDLMLENIEDLAKILTWENGKCLTDATGEIKYAASYFEWFAEEAKRIYGNTIQPSNNNNKVITYKQPIGVVGLLCPFNFPTAMGARKLAPSFAAGCTTILKPDGQTPLSSLALAYLAEKAGFPKGTFNVVLASTENTPKVGLEFCESPRIKKISFTGSTPVGKLLMRQSSSTLKKLSMELGGNAPIIIFDDADLDLAVEQSIASKFRSLGQTCVCANRLYIQSGVYDKFCEKFTEKVKEFKIGNGLEKGITHGCLINDKAITKVEEHIKDAVGKGAKVLVEGGRLPNLGKNFYAPSVVKDVTQEMVVVKEETFGPLAALLKFDTKEQVLDWCNDTPYGLASYVFSENLNTIWFMSEYLESGMVAVNTGLFTDAAMPFGGVKESGFGREGSLYGIDDYTVVKAITLGNMYR

SEQ ID NO: 51058 - protein, 406 aa, Oryza sativa
  misc_feature (27)..(27): Xaa can be any naturally occurring amino acid
  unsure (1)..(406): unsure at all Xaa locations
MSFRSLIQEMRDEFGSISRHSLRSRSXPRRRRRAAGCGGWARGSARRYPTDVVRACGARCSSEDVHEVRIEESEVWWPSRRDVVACAGVCRSWRGITKEIVRVPEASGKLTFPISLKQPGPRDGTLKCFIRRNRTTQTYYLYIGLTEALADDGKFLLAARKCRKPTCTDYLISLDMSDMSKGSNTYIGKLRSNFLGTKFTVYDAHPPYDGAVVSKSRSARVVGLNQVSPRVPAGNYPVSHISYELNVLGARGPRRMNCIMDSIPTSAVQEGGKAPTQTEFPLSGLDSFPSISFFRSKSARIDSATSQLSTQKEEKLVLKNKSPRWHEQLQCWCLNFRGRVTVASVKNFQLVASDENGPTNQEQDKVILQFGKIGKDLFTMDYRYPISAFQSFAICLSSFDTKIACE

SEQ ID NO: 51059 - protein, 720 aa, Pseudomonas syringae pv. phaseolicola 1448A
MNDSEMGAQTPDNVPRLDTGLASLVMLARFHQVAASPEQLAHEFGSPDQCLSQDSLLLAARKLGLKAKAAKTTAERLDRTPLPAIAADNNGGIFIIARLDQGKALIHDPLAQRPEVVTFEALQARWTGQLLLIRSEAGTPGESSSFDFTWFIPAIVKYRKLLGEVMLVSFVLQIFSLITPLFFQVVMDKVLVHHGLTTLDVIAIGLAGVMLFESALSGLRTYIFAHTASRIDVELGSKLFRHLITLPLSYFQARRVGDSVARVRELENIRNFLTGNAITLLLDVLFSVVFIAVMFYYSGWLTLIVLLSLPLYILVSVLITPVLRKRLNDSFARGAENQAFLVETVNGIDTLKSMAVEPQAIRKWDNQLAGYVAAGFKTQNLSTIANESVSLIGKLVTVATLWFGARLVIDGQLSVGQLIAFNMLAGRVAQPIMRLAQLWTNFQQTGVSVQRLGDILNTRNELSQVNRSALPPIKGRIEFDQVHFRYRPDGSEILRGINLVITPGQVIGVVGRSGSGKSTLTRLLQRLYVPERGRVLVDGMDLALADVSSLRRQIGVVLQDNMLFNRSIRENIALSDAGAPLEAVMQMAKLAGAHDFILELPEGYDTMVGEHGASLSGGQRQRIAIARALMGNPRILIFDEATSALDYESERIVQQNMQAICKGRTVIIIAHRLSAVRDANRIVVVDRGQIVEQGTHAELLTHQAGHYSRLHRLQQGGSHV

SEQ ID NO: 51060 - protein, 572 aa, Neurospora crassa
MSDIEKGSAGSHDKETRVDAATLPAYEAGSVAEAQQEDFMTRNGLNLASFKPRRFHTGDGTEIERTMKSRHLHMIAIGGSIGAGFFVGSGKALHNGGPASLLIDFAIIGVMMFNVVYALGELAVMFPVTGGFYTYSTRFIDPSWGFAMGWNYVFQWAMVLPLELTVCGFTVGYWNQDITVWITTFLVAIIIINVFGTLGYAEEEFWASAFKLGATIVFLIICLVMVLGGGPKGSRYDHYTGAALWYSPGAFANGFRGFCSCFVTAAFAFSGTELVGLAAAEDKNPVKSLPGAIKQVFWRITLFYILGLFFVGLLIPYDDENLLGANPFINVNASPFVLVGKYANLTGFDSFMNVVILVSVLSLGVSCVYGGSRTLTALAQQGYAPKIFTYVDRSNRPLFSVLLIIAFGPLAYVNLAAAGPTVFDWLLSLSGLAALFTWGSICLSHIRFRKAWALKGHSVEEIPFRAAGGVWGSWLGLVLVVLVLIAQFYVAICPPGGGFNTVEGFFVQYLALPVVIVFWIGGFIWKRTSWLRVDQIDVDTGRREHDWESINAYQAELAAMPAWKRWFHKLFV

SEQ ID NO: 51061 - protein, 363 aa, Prosthecochloris aestuarii DSM 271
MFISDPVYRKIVVKVGTNVITNADGKLNLDILDQLTTQIARLCNQGIEVLLVSSGAVGAGRSIITLPVGLPPVARRQVLSSTGQIKLINTYADLFARHGVTTAQILVTKSDFRDRQHYLNMRTCFSSLIEQSVIPVINENDAVSVTELMFTDNDELSGLIASMMQVDAHIILSHVDGLFDLSKKKDNPEVIPQIDPEDTRFHKFIQPGKSEFGRGGMLTKCHIARKLAGFGISVHIANGRTPGILYDIVSGKSVGTKFLAKKPTHGRKRWLAHSEGMEKGAVTINAGAEKALRSPTEANSLLPVGIESVKGAFYKGDIIKICTENGEIIGYGMARYSSEKTRELLGKTGEKPLIHYDYLYINI

SEQ ID NO: 51062 - protein, 419 aa, Prosthecochloris aestuarii DSM 271
MTMKDTILDNLVHVREASRLLATRSEKEINGILLDLAGRIAERAPIIIEANQKDLDRMDPNDPKYDRLLLTEERLKAIAADIENVVTLPAPTGRILEQRTLPNGLELRRQTVPLGVIGIIYESRPNVTFDVFALCLKSGNATVLKGGSDARDSNIAIVNLIHEVLLDNGMNAETIYLLPAEREAAGVMLNAVGSIDIIIPRGSQQLIDYVRTHSTVPVIETGAGIVHTYFDASGELDMGRQIVLNAKTRRPSVCNALDTLIMHRDQLNDLAAIAEPLAEKQVIIFADEEAYPSLLGRYPSELLQKAEEKHFGTEFLSLKMSVKTVGNLEEALAHISRYSSMHSEAIIATDPEVRDAFLQRVDAAVVYANTSTAFTDGAQFGLGAEIGISTQKLHARGPMALKELCTYKWIIEGNGQVRS

SEQ ID NO: 51063 - protein, 583 aa, Zea mays
MARGIILLLLVIPLVVRIEGSVMGERSNSFSQDSNNSSPAENKLEPGEKSFASEAYAVNWNEPPDLQMQDSFERPELYRKQSVQGEKSFASEAYPVKWSISPSLGQQSQESFEPEAYPMKWKEPPPSGQQSQDSFEPEAYRVKWNKSPPPHQQSQDSFEPEAYRVKWNKSPPPLQQSQDSFEPEAYRVKWNKSPPPHQQSQDSFEPEAYRVKWNKSPPPLQQSQDSFEPEAYRVKWNKSPPPHQQSQDSFEPEAYRVKWNKSPPPLQQSQDSFEPEAYRVKWNKSPPPQQQSQAGSFEPEAYRVKWNKSPPPLQQSQDSFEPEAYWVGWKQHAQGETDVADGTTPARGHGLHVATGMLFTRKSLLPGTALPEGTRFSGHGFPDPQRFALRADADAIPFSYSQLDTILRMFRIPRGSKKAEQVADTLRACEAESSDAHACATSEQAAADFAASSLGVRASDLVSVVTAVHGGKDATRYVVAPDGVTRIGKAAGAATAVPCHPMPYPYMVHYCHRPTDVEALRVELTGLGDDGATIAIAMCHANTMSWDDRYFQMLNATRGEEICHFMPWNYVLWLPAADLLANN

SEQ ID NO: 51064 - protein, 232 aa, Arabidopsis thaliana
MLRSSIRLLYIRRTSPLLRSLSSSSSSSSSKRFDSAKPLFNSHRIISLPISTTGAKLSRSEHSMAASSEPKSLYDFTVKDAKGNDVDLSIYKGKVLLIVNVASQCGLTNSNYTELAQLYEKYKGHGFEILAFPCNQFGNQEPGTNEEIVQFACTRFKAEYPIFDKVDVNGDKAAPVYKFLKSSKGGLFGDGIKWNFAKFLVDKDGNVVDRFAPTTSPLSIEKDVKKLLGVTA

SEQ ID NO: 51065 - protein, 485 aa, Candida albicans SC5314
MAPTFTNSNGQPIPEPFATQRVGQHGPLLLQDFNLIDSLAHFDRERIPERVVHAKGSGAYGVFEVTDDITDICAAKFLDTVGKKTRIFTRFSTVGGELGSADTARDPRGFATKFYTEEGNLDLVYNNTPVFFIRDPSKFPHFIHTQKRNPETHLKDANMFWDYLTSNEESIHQVMVLFSDRGTPASYREMNGYSGHTYKWSNKKGEWFYVQVHFISDQGIKTLTNEEAGALAGSNPDYAQEDLFKNIAAGNYPSWTAYIQTMTEAEAKEAEFSVFDLTKVWPHKKYPLRRFGKFTLNENPKNYFAEVEQAAFSPAHTVPYMEPSADPVLQSRLFSYADTHRHRLGTNYTQIPVNCPVTGAVFNPHMRDGAMTVNGNLGSHPNYLASDKPVEFKQFSLQEDQEVWNGAATPFHWKATPADFKQAQELWKVLKRYPNQQEHLAHNIAVHAAGADAAIQDRVFAYFGKVSQDLADAIKKEVLELSPRK

SEQ ID NO: 51066 - protein, 754 aa, Campylobacter jejuni RM1221
MKNSIISYPRIGANRELKFAIEKYFKNQSSKEELLKSAKDLRIRHWQEIQKAGIDFIPSNDFSLYDNVLDAAVLFNIVHTKYKNLNLDALDEYFAQSRGYQGENGDVTALAMKKWFNTNYHYLVPECDNADIIALTGDKIFKEYLEAKELGIESKPVLIGIFTLFKLIAFKDEKTQKLAKEKLLNAYIELFDKLNELKVTWLELDEPYLVYDLSKEDIALFEEFYQELLNHKKDLKILLQSYFGDLRDIYPKLLESKFDALGLDFIEGKQSLALVQKYGFAKDKILFAGLINGKNIYTNDYAKSLKLIKELQKYTQNIILNTSCSLLHVPYSTEFESKLDSNYLKLFSFAKEKLQELKDLKEILNSSEENPLFRANQELFKNIPERLDEKVKARLKALKKEDFTRTPSFKERALIQKEFLKLPLLPTTTIGSFPQSADVRSNRLAFKQEKISAQNYTEFNQQKIKECIQIQEEIGLDVLVHGEFERNDMVEYFGENLKGFLFTQNGWVQSYGTRCVKPPVIWGDVSRTKPITLAWSKFAQSLSQKIVKGMLTGPVTILNWSFPREDISLKESTEQIALAIRDEVLDLENAGIKIIQIDEAALREKLPLRKSDWHSEYLDWAIPAFNLVHSGVKAKTQIHTHMCYSEFSDILKEIDAMDADVISFEASRSNLSLLDTLKAIRFKTEVGPGVYDIHSPRVPSVEELSLTIEKILNKLPKEQIWINPDCGLKTRAYEEVIASLKNLVTATQKIREQL

SEQ ID NO: 51067 - protein, 468 aa, Corynebacterium glutamicum ATCC 13032
MNASPAPTRSFKGLRARHIHFIALGSAIGTGLFYGSAGAIQAAGPSVLLVYLLGGAVVYFMLRALGEMAVHHPVRGSFAVYTRAHLGGWAGYITGWMFAFEMLIVCLADLTAIGIYMNFWFPGTPQWTWVVATLLIVGGANLASVRWFGELEFIFTIIKVTAVVAMIVGGAAILAFGLGANAEVAGVSNLWEHGGFFPNGVEGMIAAFILVLFAFGGTEIIGVAGSEAEDPEKSIPKAVNTVPVRILLFYVGAILVILALNPWPSITGEESPFVQIFDTLGVNWAAGLLNAVVITAALSAINADLFGAGRVLTGLAKENLAPKAMGKIAKNGVPVMTTTIMIIVLIVGVILNAVLPERVFEIVASLATFATVYVWLMILLAQVGSRRNMPADEVKSLKFPVPFYPFGQYFAILFIAFTFGIMVWYDNYHLPLAVGVGFLVLMTILYYATGRPKAIAPIDYEELDPRRD

SEQ ID NO: 51068 - protein, 631 aa, Bordetella bronchiseptica RB50
MIHLDGAAVDPAVLQGMTDAIAHRGPDGEGHWIDGNVGLGHRRLAIIDLSPAGHQPMISADSRYVLSYNGEIYNFRELRAELQGEGCQFRSQTDSEVLLHALIVWGVERTLSRLNGMFAFAWWDTRERKLLLARDRYGVKPLYFSMQGTTLAFGSEQKAILASAAFRRNLNKAALLEYFTFQNIFTDQTLLEDVHLLPAGHYAYLDCAKERPQLRLTQYWDFNFHEPAVPGTDTEYREELSRLFRQAVQRQLVSDVELGSYLSGGMDSGSITAVAAASHPYIKTFTCGFDLNSASGIELAFDERSKAEYMSYFFKTEHYEMVLKSGDMERVLPALAWHLEEPRVGQSYPNYYAAKLASKFVRVVLSGAGGDELFGGYPWRYYRAVVNNDFEHYVDKYYLFWQRLIPNSTLKQVFRPVWSDVSHVWTRNIFRDVFNSHADQLYSPEDYINHSLYFEAKTFMHGLLVVEDKLSMAHGLESRVPFLDNDLVDFATRCPVRLKLNNLADVIKLNENEPGHKTNKYFEKTRDGKQILRDVMRDYIPSDIAQAEKQGFSAPDASWFKGESMDFVKRTLFSKHARIYEIMDADTVRSLVAEHLSGERNRRLLIWSLLNVESWLAQYLDHGGVAGKGLA

SEQ ID NO: 51069 - protein, 215 aa, Triticum aestivum
  misc_feature (32)..(32): Xaa can be any naturally occurring amino acid
  misc_feature (48)..(48): Xaa can be any naturally occurring amino acid
  misc_feature (55)..(56): Xaa can be any naturally occurring amino acid
  misc_feature (81)..(81): Xaa can be any naturally occurring amino acid
  misc_feature (100)..(100): Xaa can be any naturally occurring amino acid
  misc_feature (108)..(108): Xaa can be any naturally occurring amino acid
  misc_feature (120)..(120): Xaa can be any naturally occurring amino acid
  misc_feature (135)..(135): Xaa can be any naturally occurring amino acid
  misc_feature (140)..(140): Xaa can be any naturally occurring amino acid
  misc_feature (150)..(150): Xaa can be any naturally occurring amino acid
  misc_feature (156)..(156): Xaa can be any naturally occurring amino acid
  misc_feature (191)..(191): Xaa can be any naturally occurring amino acid
  unsure (1)..(215): unsure at all Xaa locations
CITGLPDGPVCYRISRGSCEWKQKSTVWHDRXGTKHSKDPPEHYLAGXGVGTFHXXKQGMDLGLCITRCDTMDLLGQGKSXRVKITAPKDMEDEDEESYXGIGQDSTXPWADRIGVLLVXTRSGQVQHFIEEVIXGEPVXSLLGNSLGGXRNSKLXASIPHHVKGVTSRSATPLCGTYPHHARSRSLSKIXTWRWTIHLPPGVSKGNEPAKQNII

SEQ ID NO: 51070 - protein, 462 aa, Listeria monocytogenes EGD-e
MFKTNVEQNNVPVFGSFESGQDLPEKRMNKESVDPRIAYQLVKDQLIDEGSARQNLATFCQTYMEPEAEQIMAETMEKNAIDKSEYPQTAKLESSCVNMLADLWNVDESEHYMGTSTVGSSEACMLGGMAMKFRWRSAALKNGLDIHAKKPSLVISSGYQVCWEKFCVYWDIELREVPMSEEHLSINTDIIMDYVDEYTIGIVGILGITYTGKFDDIMTLNDLVEDYNNTHDNEVVIHVDGASGAMFTPFVEPGLEWDFRLPNVVSINTSGHKYGLVYPGVGWILWRDKEYLPEELVFDVSYLGGHMPTMAINFSRSASQIIGQYYNFLRFGYEGYRQIHMRTRDGALQLSQAVAETGLFEIYNDGANLPIVCYKLKDDANVAWTLYDLADRLQMKGWQVPAYPLPKEMGNTIIQRYVCRGDLGQNMVTAFKNDLSESIEELNNAHILYHDVNTSKTHGFTH

SEQ ID NO: 51071 - protein, 479 aa, Zea mays
MECARELRVRSTFTAAAMASKKQVGPGGAVPAQEQMNGGDAARLVRKPMDTFPQPAAARGRRALVDVGNLMNGRPSLVNHQKQAVAAAATSHKPLNVGNKKPLVPQAAARGLRPLADVTNLMIKDRAAPANRQKPVDAVFNRNGKAVKLKECKVKPEVIVIIPDSEKEKKGKFPGGQRVCRRVPTLFDNLTKCSRASDGITTPKKKDPYDIDAPDSCNELAVVEYVEDIYRFYKSTEGTCLPLSSYMSSQAEISERMRAILIDWIIEVQYRLTLMPETLYLTVYIIDQYLSMESVPRKELQLVGISAMLIASKYEEIWAPLVKDLMCLCDNAFTRDQILTKEKAILDMLHWNLTVPTMYMFIVRYLKAAMCDAELENMTFFYSELALVQYAMLVYPPSVTAAAAVYAARSTLGMNPQWTDILEHHTGLAEPQLLDCARRLISFHALAPESKQKAVYRKYSKPKLGSVALQSPDKKLLSG

SEQ ID NO: 51072 - protein, 234 aa, Triticum aestivum
AYPGDSIEQVCTKKQAGTGPEFPGYRRPTRPKNARGQQGSYPIKLFYTSNMPIILHSALITNLYFISQLLYRKYSGNFLVNLLGIWKESEYSGHSIPVGGLAYYVTAPSSMADILANPFHALFYVVFMLSACALFSKTWIEVSGSSAKDVAKQLKEQQMVMPGHRESNLQKELNRYIPTAAAFGGVCIGALTVLADFMGAIGSGTGILLAVTIIYQYFETFEKERATELGFFGF

SEQ ID NO: 51073 - protein, 149 aa, ASPERGILLUS NIDULANS FGSC A4
MAPKTKAPAKDNVTLGPLAGDGKLVFGVARIFASFNDTFVHVTDLSGRETICRVTGGMKVKADRDESSPYAAMLAAQDVAARCKELGINALHIKIRATGGNGTKTPGPGAQSALRALARSGMRIGRIEDVTPTPSDSTRRKGGRRGRRL

SEQ ID NO: 51074 - protein, 309 aa, Arabidopsis thaliana
METDSIDSVIDDDEIHQKHQFSSTKSQGGATVVISPATSVYELLECPVCTNSMYPPIHQCHNGHTLCSTCKSRVHNRCPTCRQELGDIRCLALEKVAESLELPCKYYNLGCLGIFPYYSKLKHESQCNFRPYSCPYAGSECAAVGDITFLVAHLRDDHKVDMHTGCTFNHRYVKSNPREVENATWMLTVFQCFGQYFCLHFEAFQLGMAPVYMAFLRFMGDEDDARNYTYSLEVGGSGRKQTWEGTPRSVRDSHRKVRDSHDGLIIQKNMALFFSGGDKKELKLRVTGRIWKEQQNPDSGVCITSMCSS

SEQ ID NO: 51075 - protein, 197 aa, Zea mays
  misc_feature (19)..(19): Xaa can be any naturally occurring amino acid
  misc_feature (25)..(25): Xaa can be any naturally occurring amino acid
  misc_feature (43)..(43): Xaa can be any naturally occurring amino acid
  misc_feature (70)..(70): Xaa can be any naturally occurring amino acid
  misc_feature (111)..(111): Xaa can be any naturally occurring amino acid
  misc_feature (117)..(117): Xaa can be any naturally occurring amino acid
  misc_feature (135)..(135): Xaa can be any naturally occurring amino acid
  misc_feature (168)..(168): Xaa can be any naturally occurring amino acid
  unsure (1)..(197): unsure at all Xaa locations
AGLLAVLEAGARIAAAGKXNLFCRXLHPQLAIQRTLTCVMESXSDSSQTLQSASASGIMGMAPILAKGCXTCERILPICLFLLIDEFPDALLIIFSKLDQVNQVMGFNFLXHTLLPXIVELAEDKHWTLPLAIIXEYIPLLASQLRVRIFDDKLGSLCMQWSEDKVFXSHNAAGNNLKRLWEESCTEWSMQHIIPAV

SEQ ID NO: 51076 - protein, 179 aa, Zea mays
MAEAPASPGGGGGSHESGSPRGGGGGGSVREQDRFLPIANISRIMKKAIPANGKIAKDAKETVQECVSEFISFITSEASDKCQREKRKTINGDDLLWAMATLGFEDYIEPLKVYLQKYREMEGDSKLTAKSSDGSIKKDALGHVGASSSAAEGMGQQGAYNQGMGYMQPQYHNGDISNV

SEQ ID NO: 51077 - protein, 392 aa, SYNECHOCOCCUS SP. WH 8102
MTNSLLPVKDAHRQAFNAINTPDRLLLGPGPSNAHPTVLEALSRTPIGHLDPLYVELMGEVQELLRYAWQTDNRLTLPMSGTGSAAMEATLANTVEPGDTVLVAVKGYFGLRLADMAGRYRATVKTIEKPWGEWFSLEELEAALIEHKPAILALVHAETSTGVCQPMDGVGDLCRKHDCLLLLDTVTSLGGVPLYIDEWKVDLAYSCSQKGLSCPPGLGPFTMGPRAEAKMATRSGKVPNWYLDVSLLNQYWGSDRVYHHTAPVNMNFGMREALRLLAEEGLDQAWARHRRNAERLWSGLERQGLSMHVPEELRLPTLTTVRIPDGVDGKAFSQHLLNTHGIEVGGGLGSLAGKIWRIGLMGYNSTPENVDRLLNLFETELPRFSGSVAAAA

SEQ ID NO: 51078 - protein, 464 aa, Salmonella enterica subsp. enterica serovar Typhi Ty2
MKNASTASGASVSDAASKNEPTLQRGLQNRHIQLIALGGAIGTGLFLGIGPAIQMAGPAVLLGYGVAGIIAFLIMRQLGEMVVEEPVSGSFAHFAWKYWGPFAGFLSGWNYWVMFVLVGMAELTAAGIYMQYWLPDVPTWVWAAVFFIIINAVNLVNVRLYGETEFWFALIKVLAIIGMIGFGLWLLFSGHGGEHASIDNLWRYNGFFATGWHGLLLSLAVIMFSFGGLELIGITAAEARDPQKSIPKAVNQVVYRILLFYIGSLVVLLALYPWVEVKSNSSPFVMIFHNLDSNVVASALNFVILVASLSVYNSGVYSNSRMLFGLSVQGNAPKFLTRVSHRGVPVNSLMLSGAITSLVVLINYLLPQKAFSLLMALVVATLLLNWIMICLAHLRFRAAMRRKGRETQFKALFYPAGNYLCIAFLALILVLMCTMDDMRLSAILLPVWIVFLFIAFTVLRRKAH

SEQ ID NO: 51079 - protein, 470 aa, Zea mays
  misc_feature (199)..(199): Xaa can be any naturally occurring amino acid
  misc_feature (246)..(246): Xaa can be any naturally occurring amino acid
  unsure (1)..(470): unsure at all Xaa locations
MESRRGGSSAAAAEDAGGAMPSFGPTQHAIRAGADVNSMQPSRVTDFGALAQSAGFRIEDLANLNANALFNLKPNSHTIDNSPLQFGNYGKSISSHINTTEATTAATRIDPQLSAQQTGAQPILVALPTGNMENWGESAMADSPMTDTSTDPDTDERNQMFEQGLVAVPTASDSSDKSRDKLDQKTLRRLAQNREAARXSRLRKKAYIQNLESSRLKLTQLEQELQRARQQGIFISTSGFYVHVVXSVGALAFDMEYARWLEEHNKHVNELRLAVNAHAGDNDLRGIVGSVMAHYDEFFRLKGVAARSDVFHVLSGMWKTPAERCFMWLGGFRSSEVLKLLAGHLEPLTDQQLVGISNLQQSSQQAEDALSQGMEALQQSLAETLASGSLGPAGPSGNVANYMGQMAMAMGKLGTLENFLRQADNLRLQTLQQMQRILTTRQSARALLAISDYFSRLRALSSLWLARPRE

SEQ ID NO: 51080 - protein, 447 aa, Glycine max
  misc_feature (202)..(202): Xaa can be any naturally occurring amino acid
  misc_feature (218)..(218): Xaa can be any naturally occurring amino acid
  unsure (1)..(447): unsure at all Xaa locations
MHMNTYSEATTSQPMPPTMDEDLENNTEDCNNAMTPMVRKKSELVVVTNNDSRFQMLRNFMTNLQEVIFGTKLVVLFPAVPLAVVANFYSFGRPWIFAFSLLGLAPLAERVSFLTEQIAYFTGPTVGGLLNATCGNATEMIIALLALHQNKVHVVKLSLLGSILSNLLLVLGSSLLCGGLANLKREQRYDRKQADVNSLLLXLGLLCHLLPLLFKYAXEEADHSIATSTLQLSRASSVVMLLAYAAYIFFQLKTHRKLFDAQEVDDDEEKAVIGFWSAFTWLVGMTLVISLLSEYVVGTIEAASDSWGISVSFISIILLPIVGNAAEHAGSIIFAYKNKLDISLGVAMGSATQISMFVVPLSVVVAWIMGIRMDLDFSLLETGCLAFTIIITAFTLQDGTSHYMKGVILTLCYIVIGACFFVLKTPLIGQSPKASFGVKPSFEAITT

SEQ ID NO: 51081 - protein, 225 aa, Zea mays
MPYTTACLPAARRSRVVLGVNQLDRAMQPPTTAKRDRAAWEADAGAADTARLLMLLAQAQAQQQQRLLQHAYHHGVAPLFPAGRVFECKTCSRQFPTFQALGGHRASHKRPRALQQQQPVVVADDHDAGLCLGRQPPKPRRVHECPVCGLEFAIGQALGGHMRRHRADAEVRPPPDKARDVAGGICLDLNLTPSENCAKCRSVVVLGAAAGQGVHKALAMLDCSL

SEQ ID NO: 51082 - protein, 441 aa, Salmonella enterica subsp. enterica serovar Typhi Ty2
MTQYQALIIGFGKAGKTLAATLAKTGWRVAIIEQSASMFGGTCINIGCIPTKTLVYDAEREGDFSVAMQRKAAVVNFLRDKNFHNLADLDNVDVIEGRAEFIDNHTLRVFQADGERVLRGEKIFINTGAESVIPAITGLTTTAGVFDSTGLLSLSQRPARLGILGGGYIGLEFASMFANFGTKVTIFEAAPQFLPREDRDIAQAITHILQEKGVELILNANVQAVSSTEGAVQVETPEGAHLVDALLVASGRKPATAGLQLQNAGVAVNERGGIIVDDYLRTTADNIWAMGDVTGGLQFTYISLDDFRIVRDGLLGDGKRSTRDRQNVPYSVFMTPPLSRVGLTEEQARASGATVQVVTLPVAAIPRARVMNDTRGVLKAVVDVNTQRIVGVSLLCVDSHEMINIVKTVMDADLPYTVLRDQIFTHPTMSESLNDLFSLIK

SEQ ID NO: 51083 - protein, 112 aa, Thermococcus kodakarensis KOD1
MKVYRLFVKDEYLNFIRSGEKRIEVRVAYPQFRNIRPGDKIIFNDSIPAVVTEVKKYETFRQVLREEPIKKIFPDEPSFERAVKRFHNLYPKWKENRYGVIAIKFKLLGEGR

SEQ ID NO: 51084 - protein, 234 aa, Thermococcus kodakarensis KOD1
MKAVFFDFVGTLITKAGENVTHLNIVREVLKKAGRGDLDAEEVWRAYEEESSALFSELAGKEAVKIRDVDTEAMRRVAERYGFTVPKDFWEISIRMHEKYGQLFPDAVDTIKALKGMGLHVGIITDSDNDYITAHLKALGIYDLFDSITTSEEAGFFKPHPRPFQLALEKAGVKPEEALYVGDNPKKDCVGAKNIGMTSVLLDPNGEKRELWENCDFIVSRLSEVVGIIKGLKG

SEQ ID NO: 51085 - protein, 447 aa, Nicotiana tabacum
MGKEKFHINIVVIGHVDSGKSTTTGHLIYKLGGIDKRVIERFEKEAAEMNKRSFKYAWVLDKLKAERERGITIDIALWKFETTKYYCTVIDAPGHRDFIKNMITGTSQADCAVLIIDSTTGGFEAGISKDGQTREHALLAFTLGVKQMICCCNKMDATTPKYSKARYDEIVKEVSSYLKKVGYNPDKIPFVPISGFEGDNMIERSTNLDWYKGPTLLEALDQINEPKRPSDKPLRLPLQDVYKIGGIGTVPVGRVETGVLKPGMVVTFGPTGLTTEVKSVEMHHEALQEALPGDNVGFNVKNVAVKDLKRGFVASNSKDDPAKGAASFTSQVIIMNHPGQIGNGYAPVLDCHTSHIAVKFAEILTKIDRRSGKEIEKEPKFLKNGDAGMVKMIPTKPMVVETFSEYPPLGRFAVRDMRQTVAVGVIKNVDKKDPTGAKVTKAAQKKK

SEQ ID NO: 51086 - protein, 993 aa, Anabaena variabilis ATCC 29413
MVLQVQTSTYEAKTQEIARQLLGATQENRSFFASLRDQMRWDDKLLAWAMSNPGLRVQLFRFIDTLPALHSKAEIAAHLQEYLGDESVELPAALKGMLNFANPDSVPGQVAATTVSTAVETLAHKYISGENIKQVIKTVERLRKEKMAFTIDLLGEAVITETEAQSYLERYLELISQLTEASKNWGTVGAIDEADGEQLAKVQVSVKLTAFYSQFDPLDAKGSEEKVSDRIRILLRRAKELGAAIHFDMEQYAYKNLTLNILQKILLEDEFRQRTDIGITIQAYLRDSEQDARNAIAWLKQRGYPLTIRLVKGAYWDQETIKAAQKHWPQPVFNDKAATDANFEAITQLLLENNQYVYSAIGSHNVRSQALAIAIAETLQVPRRRFEMQVLYGMGDKLAKALVDRGYRVRVYCPYGDLLPGMAYLIRRLLENTANSSFLRQNLENRPVEELLAAPDINLAHAKAQRSKEEKGSFGATDTDFAVEEERKEAARAFAEVRGALGRSYLPLINGEYVQTAEVIDSVNPSNFGEVIGKVGLISVEQAEQAMQAAKAAFPGWRRTPVKERAAILRRAGDLLEERRAELSAWIVLEVGKPVKEADAEVSEAIDFCRYYADEMERLYQGINYDVAGETNRYIYQPRGIVVVISPWNFPLAIACGMTVAALVTGNCTLLKPAETSSVITAKLTEILLEAGIPKGVFQYVPGKGSQVGAYLVSHPDTHLIAFTGSQEVGCRIYAEAATLKPQQRHMKRVIAEMGGKNAIIVDESADLDQAVIGVVQSAFGYSGQKCSACSRVIVVEAIYDAFIHRLVEATKSLNIGEAELPSTQVGPVIDANARDRIREYIEKGKAESQVALELSAPNHGYFVGPVIFGEVPPHGTIAQQEIFGPVLAVIKAKDFAQALAIANDTDYALTGGLYSRTPSHIQQAQEEFEVGNLYINRNITGAIVARQPFGGFKLSGVGSKAGGPDYLLQFLEPRTITENIQRQGFAPIEGAE

SEQ ID NO: 51087 - protein, 293 aa, Sulfolobus solfataricus P2
MIIVVGSYNVDVILKVNKIPEIGETVIADELYITHGGKGSNQAVSASRLGSHVKIIVAVGDDKHGTDAIEFWKSENIDVSKVKVKSGINTGTAYIFVDKKGRNIIVVNRGANYYLSEDDLNNSLEGDILLMQLEIRESVVKKAAKEFNGIKILNPAPANLKDTEILSLVDIITPNEIEFKELVNTDDFEYGLNLLLKKVKKAVIVTLGERGALLATRDGKKVLIPAPKVNVIDETGAGDVFNAALSVYLEKGYDLETAVEYANKVAALSVTKIGALGPKLDEVVRFLEEIDKA

SEQ ID NO: 51088 - protein, 256 aa, Oceanobacillus iheyensis HTE831
MKKCRIKEMLETSKVDECNMNILIVEDDKTIATGLEYSLKQEGYDVVVCHKVQEAQRKINNDLDDISLCLFDLSLPDGSGYELCEMVKRKADIPVIFLTVVDDEVNVVMGLDMGADDYITKPFRIRELISRIKTVLRRYEKSKPNKEQLSSVISIGSINIHTLEGKVYKETEEILLTALEYRLLMIFVNHRGQVLSRKQLLQLIWDIAGDFVNDNTLTVYIKRLRKKIEEDAQHPTVIETVRGMGYRMVDTHDKKQ

SEQ ID NO: 51089 - protein, 220 aa, Glycine max
  misc_feature (8)..(8): Xaa can be any naturally occurring amino acid
  unsure (1)..(220): unsure at all Xaa locations
QSERLGYXFAKWMGVQTPQGRVIHNTCLEWQQIKEAAEKAREAANSEGDEIGEVTCFELLEALELSRCLFFMSYVHGSPLLENSSAFESRESAERTSEALGRVLMLDLVIRNEDRLPCHELKWRGNPANLLLAGKNICANTDALESAFDSAVNRYRPKVIRAFQKERKSTSVDCRLNSHNPGLISQSYDLSDITESPRSADMSFQTSGESLSSDFNIGAI

SEQ ID NO: 51090 - protein, 272 aa, Methanosarcina acetivorans C2A
MATELRATEHGRQKISEKFDELKQKKEGALIGYVMAGDPSAEATFGIVKALVNGGADIIELGFPFSDPVADGPTIQAAGQRALAAGMDIEHYFELVRGLGVEVPLVCMTYYNPVFRYGVDKFVEHAADAGISGLIIPDIPVEEAADLKSSCEKYGLDLIFLVAPTTTDARIRKILERGSGFIYLVSRLGVTGARADVSGSTKELLSRVKTDIPKAVGFGISTGKQAAEVRKAGADAVIVGSVFVRIIEEGNGVNEKLEALARELKSGILGAN

SEQ ID NO: 51091 - protein, 549 aa, Bradyrhizobium sp. BTAi1
MTQPQRMTAPTLPTYSPRGLALLRDPLLNKGTGFTEQERDALGLRGFLPAGVLSMQAQAERILVNLRSLPSDLEKYVALNALHDRNEALFFRVVCDNIDEIQPLIYTPTVGLACQKYGLIFQRPRGLFISANDRGRIAEILANWPYRAKLIVVTDGERILGLGDLGANGMGIPVGKLSLYSACAGIHPEECLPVMLDVGTNNEEFLKDPYYIGLRQKRITGAAYDEFVDEFMTAARAAFPGVLIQFEDFANHAAFKLLHKYRDDACVFNDDIQGTAAVALAGLFSALRITGGRLRDQRVLFLGAGEAATGIADLVVSAMMAEGLSEAEALQRNWLTDSRGLVVKGRENLHGHKLRYAHEQAPIGDFLTSIRTLKPTAIIGVAAVGGAFTPEVLQAMAELNERPIIFALSNPTSKAECSAEAAYRYTQGRALFACGSPYDPVKLDGKTFVPRQGNNSYIFPGVGLGAIASGARLVTDEMFMAAAHTLANCVTGADLEQGSLYPALPRIREVSALIGAAVAGVAYQNGLASGPAPNDLLGFVEQKMYDPRY

SEQ ID NO: 51092 - protein, 409 aa, Escherichia coli O157:H7 EDL933
MTRRVVITGMGGVTAFGENWQDVSARLLAYENAVRKMPEWQVYDGLHTLLGAPVDDFTLPEHYTRKRIRAMGRVSQMSTRASELALEQAGLIGDPILTSGETGIAYGSSTGSTGPVSEFATMLTEKHTNNITGTTYVQMMPHTTAVNTGLFFGLRGRVIPTSSACTSGSQAIGYAWEAIRHGYQTVMVAGGAEELCPSEAAVFDTLFATSQHNDAPKTTPSPFDENRDGLVIGEGAGTLILEELEHAKARGATIYGEIVGFATNCDAAHITQPQRETMQYCMEQSLKIAGLSAQDIGYISAHGTATDRGDMAESLATATIYGDNVPLSSLKSYFGHTLGACGALEAWMSLQMMREGWFAPTLNLNKPDPNCGALDYIMHEARKVDCEFLQSNNFAFGGINTSIIIKRWP

SEQ ID NO: 51093 - protein, 392 aa, Gluconobacter oxydans 621H
MSLFDSHFTATLSEREAAGTRRTLRPVVRQDGMIVRDGRRMLDVSSNDYLGLADHPLLRERAADWALRFGTGARASRLVSGTLDLHRQVETKMAAFKGCEDAILFASGWQANASVMPALCALSVARTGAPMLVFSDRLNHASLHHGCAAAGVRQIRFRHNDLSHLETLLAREAEKPGLRMIVTESVFSMDGDRADIPALRALADRAGAFLYVDEAHATGVLGPKGRGLSCGMADLTMGTCSKALGGMGAYVAGSKPLCDHLVNHASGFIYSTALPPAVLGAIDAALDVVPGLDGERALLLRQAERIRGMLHGAALSTADSTTQIVPVLIGESERAMAVATGLEEAGFLTVAIRPPTVPAGTARLRLALHAGLRDEAIDRLGQAVIALTRDIA

SEQ ID NO: 51094 - protein, 249 aa, Methanosarcina barkeri str. fusaro
MTVPNLMKRALAELVGTYVLVFLGTGSVITTVLLMEGWEAFPGNQFYIGIDIAAWFAIGMSFAIAITSMIYAFGHISGTHINPAVSLALWATGRFPTKDLPAYIISQLIGASLASFTLVAILGMRAVDAGLGATSMFYGVGYGQAIFCEAVCTFFLMLTIMGTAVDRRAPPGFAGLAIGLVVAADVIVVGNITGSSLNPARTFGPYLAESLLGGANLWAQFPIYIIGPIAGALVAAFLYDFIAEPKKAD

SEQ ID NO: 51095 - protein, 156 aa, Anabaena variabilis ATCC 29413
MALVRWEPFREVESLQRQLNRLFDEIAPTGRREEEGIAFIPSAEIQETPDAVHLKVEIPGVDPKDLDVQVSPEAVSISGERKSEIKTEERGITRTEFRYGRFQRVIPLPTRVQHDQVQAEYKDGILKLRLPKAEEDRNKVVKVNLGDGHRGNGQGQ

SEQ ID NO: 51096 - protein, 411 aa, Clostridium acetobutylicum ATCC 824
MNRRVVITGIGAVTPVGNNADSFWCSIKEGKCGIDKIKAFDATDFKVKLAAEVKDFTPEDFIDKREANRMDRFSQFAIVAADEAIKDSKLDLESIDKNRFGVIVGSGIGGIGTIEKQDEKLITKGPGRVSPMTIPMIIANMASGNLAIRYGAKGICTTIVTACASANNSIGESFRNIKFGYSDVMISGGSEAGITPLSLAGFASMKAVTKSEDPKRASIPFDKDRSGFVMGEGSGIVILEELEHALKRGAKIYAEIVGYGATCDAYHITSPAPNGEGGARAMKLAMEEDNVRPEDISYINAHGTSTAYNDSFETQAIKTVLGEYAYKVPVSSTKSMTGHLLGAGGAVEAIICAKAIEEGFIPPTIGYKEADPECDLDYVPNEGRNAEVNYVLSNSLGFGGHNATLLFKKYK

SEQ ID NO: 51097 - protein, 143 aa, Zea mays
MAGLQRSATTFRRSGSSGLVWDERFLTEAEAKAKGGGGAAAEDPQPELRHSRSVGSIGMLLRGGDSDDGNKKAKEVEKARGGHQQRVFRTKDVAPDMDPPSPRVSGCILCAILGGSSGGGKARRRPKPKPKPKPRKDVATTTA

SEQ ID NO: 51098 - protein, 661 aa, Zea mays
MVEMSVVELRTLPLGFRFHPTDEELVTHYLKGKITGRINSESEVIPEIDVCKCEPWDLPDKSLIRSDDPEWFFFAPKDRKYPNGSRSNRATEAGYWKATGKDRIIKSKGDKRKQHTIGMKKTLVFHRGRAPKGERTGWIMHEYRTTEPEFESGEQGGYVLYRLFRKQEEKTERSSPEEVDRSGYSPTPSRSSPDNLEANEEANTPLNKESPESALHESPIELPKSVETNGGSMTRWLADRNDNLMVTAPDVSHIPFHGHAAGVAKQVDPSVGASGHLVNPHNGNDDYNKFVSDFTPILPLENAFFTDIQQGAFGFDGIMNPLDPLDAFLNQTLVDPDEHSSTTSKVQYDSDIPTEFENHWNMKVEPQDDQCWWANIGFEPDEPNPLLPCDTTDQDILSVDSGADSFNELFNSMEETGIIVRPQQLDSTVQPNHVFASQGNAARRLRLQVESREIITKDESEDEVSCVLTPDCLNDSVEESTAEKDVASDGDEAESTGIVIRSHHPAPRSSSESSFTQQGTAMQRLRLQSGLNKGQRPSTDDSSSCIIDEPGSQHKAEKAEIEEDASTNLAGSADDLPGNIHDDEQKNIPEHGAEMTSPEAKSVLRLRKTSEEGNKDVKQESCLEPHVRAPMQKGGFQSYIIWLVLPVALLLLLCVGTYGWV

SEQ ID NO: 51099 - protein, 287 aa, Methanosarcina barkeri str. fusaro
MKVACIQMDVLHCRKQENLEKALHMALKAVRKGAELIVLPEVFSTGFCYEHFDHAAETLPSPLLENLACFSEANDCIIMGSVIEKVALEETSDSGTPADSENSTLSNSSNSPFYYNLGFCFESGTLAGSYRKTHPFKTENNYFSKGDSIEPISLKKQNLKIGFEICYDLRFPEVARKLSLAGSDLLVTTAAFPNPRSEHWNILAKARAIENQIPHIACNRIGSAPDCSYFGNSMIIDAWGEVKADAGNKECLIVHDLDLSRKNEVRKMIPVFENQRIELYSEDLKII

SEQ ID NO: 51100 - protein, 103 aa, Anabaena variabilis ATCC 29413
MAAVSLSISTVKPLGDRIFIKVAQAEEKTAGGILLPDTAKEKPQIGEVVQVGPGKRNEDGSRQPMEVKIGERVLYSRYAGTDIKLGSEEYVLLSEKDVLAIVE

SEQ ID NO: 51101 - protein, 240 aa, Brassica napus
VDPRVRAMPRLLPDVSDLTSFWNLFTVVPVLVTAFICHYNVHSIQNELDDPAQIRPVVRSALMLCSSVYIMTSIFGFLLFGDDTLDDVLANFDTDLGIPLGSVLNDAVRVSYALHLMLVFPIVFYPLRINIDGLLFPSARPLTTSNVRFGCLTAGLISVVFLGANFIPSIWDAFQFTGATAAVCLGFIFPASIILKDRHGRATSRDTTLAVFMIVLAVLSNAIAIYSDAYALFKKNAPRE

SEQ ID NO: 51102 - protein, 917 aa, Arabidopsis thaliana
MEFSIDRDKNLLMVVPETRIKTKQFEKVYVRRKSIKLPQNSMVHNTLIKMARQRIQKSMKESVMNQHIFKNFDSYLSVIYHPCCFVINNSQTTHKKKEKKNSKEKHGIKHSESEHLQDDISQRVTGKGRRRNSKGTPKKLRFNRPRILEDGKKPRNPATTRLRTISNKRRKKDIDSEDEVIPELATPTKESFPKRRKNEKIKRSVARTLNFKQEIVLSCLEFDKICGPIFPRGKKRTTTRRRYDFLCFLLPMPVWKKQSRRSKRRKNMVRWARIASSSKLLEETLPLIVSHPTINGQADASLHIDGNRVFFLLIYLLHQNYTLVRHVVSKQTKKSANNVIEHLNRQITYQKDHGLSSLADVPLHIEDTLIKSASSVLSERPIKKTKDIAKLIKDMGRLKINKKVTTMIKADKKLVTAKVNLDPETIKEWDVLMVNDSPSRSYDDKETEAKWKKEREIFQTRIDLFINRMHRLQGNRKFKQWKGSVVDSVVGVFLTQNTTDYLSSNAFMSVAAKFPVDAREGLSYYIEEPQDAKSSECIILSDESISKVEDHENTAKRKNEKTGIIEDEIVDWNNLRRMYTKEGSRPEMHMDSVNWSDVRLSGQNVLETTIKKRGQFRILSERILVDTNVGRIAVRLGLVPLEPLPNGVQMHQLFEYELHYQMITFGKVFCTKTIPNCNACPMKSECKYFASAYVSSKVLLESPEEKMHEPNTFMNAHSQDVAVDMTSNINLVEECVSSGCSDQAICYKPLVEFPSSPRAEIPESTDIEDVPFMNLYQSYASVPKIDFDLDALKKSVEDALVISGRMSSSDEEISKALVIPTPENACIPIKPPRKMKYYNRLRTEHVVYVLPDNHELLHDFERRKLDDPSPYLLAIWQPGFLCLRAFDRKQRDPKELVRRLHTPPDERGPKFMSDDDI

SEQ ID NO: 51103 - protein, 448 aa, Pisum sativum
REIVHIQGGQCGNQIGAKFWEVVCAEHGIDPTGRYGGDTDLQLERINVYYNEASCGRYVPRAVLMDLEPGTMDSVRSGPYGQIFRPDNFVFGQSGAGNNWAKGHYTEGAELIDSVLDVVRKEAENCDCLQGFQVCHSLGGGTGSGMGTLLISKIREEYPDRMMLTFSVFPSPKVSDTVVEPYNATLSVHQLVENADECMVLDNEALYDICFRTLKLTTPSFGDLNHLISATMSGVTCCLRFPGQLNSDLRKLAVNLIPFPRLHFFMLGFAPLTSRGSQQYRALSVPEITQQMWDSKNMMCAADPRHGRYLTASAIFRGKMSTKEVDEQMMNVQNKNSSYFVEWIPNNVKSTVCDIPPTGLKMASTFIGNSTSIQEMFRRVSEQFTAMFRRKAFLHWYTGEGMDEMEFTEAESNMNDLVSEYQQYQDATAEEDEYEEEEEDYHQEHDEM

SEQ ID NO: 51104 - protein, 158 aa, Staphylococcus aureus subsp. aureus Mu50
MVVVYVAGGCLWGVEAFFATIPGIIHTEAGRANGRSSKLDGPYDGYAECVKLHFDDRMLTITDIMNYLFEIIDPYSVNQQGNDIGEKYRTGLYSCVDDHLIEARQFIERRKDRDQIAVEVLPLSNYIKSAEEHQQHLEKYPEDMHMCHISKDLLNKYK

SEQ ID NO: 51105 - protein, 186 aa, Zea mays
GSNKRGAFISDKQKGVKKFRLHLSLPVVTTMSSGTSSGSSRWVQSSRSEDDLDLQAQMERRRKRRKESNRESARRSRQRKQEHLDDLTSQVNQLKDQNKQLSMALSITSQNLVAVQAQNSVLQTQKMELDSRLGALTEILWYMNSSTSTSTAPTNPAIANDFTAWSRASDILGGTSYSAIDLYQCF

SEQ ID NO: 51106 - protein, 450 aa, Legionella pneumophila str. Lens
MKHQLVGTKLMKKIHIKTPIPGPKSQQLMELRRQHVARGPFHATPIFVKQAKGSFVEDVDGNVFLDFSSGFGVVNTGHCPDSVVNAIKLQAEKFIHTGFNIIPYESYIKVCEKLNDHTPGHFEKKSLLLNSGAEAVENAIKIARAYTGKQAVICFDHAFHGRTYMAMTLTSKNKPYKHGFGPFPSEIHRAPFPYEYRWKGVNCVEECFNEFTDLANFRVGVENIAAVIIEPVLGEGGFIQSPALFLQKLREFCTTNDIVFIADEIQSGFGRTGNLFAMNTLGVPPDLTISAKGLGGGVVLAGVTGKAEIMDAAMEGGLGGTFGGNPLSCAAALEVFHIFEEGSLLQNVTHLAKALQSRLSGFKEKYKVVGDVRGLGVMQAIELVKDKNTKEPNKEATVQLAQFCLEHGLIILTCGTYGNVIRLHMPLSTGVKDLEIGLSIIEEGLKKLSV

SEQ ID NO: 51107 - protein, 144 aa, Triticum aestivum
  misc_feature (48)..(48): Xaa can be any naturally occurring amino acid
  misc_feature (51)..(51): Xaa can be any naturally occurring amino acid
  misc_feature (73)..(73): Xaa can be any naturally occurring amino acid
  misc_feature (80)..(81): Xaa can be any naturally occurring amino acid
  misc_feature (85)..(85): Xaa can be any naturally occurring amino acid
  misc_feature (90)..(90): Xaa can be any naturally occurring amino acid
  misc_feature (96)..(96): Xaa can be any naturally occurring amino acid
  unsure (1)..(144): unsure at all Xaa locations
MAELVGPRVYSCCTCRNHVCLHDDVISKAFQGRNGRAFLFSHAMNVVXGAXEDRHLKTGLHTVADIYCNDCRXVLGWNMXXTYEXDQKYXGRKSYXRIKDVKGNWYPNCNHKILVKMNGIVLLDVGSGTFPWMNAKGPNLIHTL

SEQ ID NO: 51108 - protein, 296 aa, Zea luxurians
RPEIAHAHQPVMSPSHHGWDGNGAAAVPTPMPKRLDGKVAIVTGGARGIGEAIVRLFAKHGARVVTADIDDAAGEALASALGPQVSFVRCDVSVEDDVRRAVDWALSRHGGRLDVYCNNAGVLGRQTRAARSILSFDASEFDRVLRVNALGAALGMKHAARAMAPRRAGSIVSVASVAAVLGGLGPHAYTASKHAIVGLTKNAACELGAHGVRVNCVSPFGVATPMLINAWRQGHDDATADADRDLDLDVTVPSDQEVEKMEEVVRGLATLKGPTLRPRDIAEAVLFLASDEARYI

SEQ ID NO: 51109 - protein, 513 aa, Magnetospirillum magnetotacticum MS-1
MIRSIRNLNRLLTIGRVLARHDALFLLEDYLPMVRFGSRLLRGGRSPVSTGRPGQRLAAALAELGPSFIKLGQALSTRADLLGEEMAADLSGLQDELPPFAAEEARRIIEEELGGPLSNFYSEFDDVPVAAASIAQVHFATTRQGREVAVKVLRPGVEAKFHRDIDLLYWLSEWAELTIPRIRRLKPVETVKTFEESVTLEMDLRFEAAAASELAENFRGDDNFKVPEVDWLRTGKRLLTLERVAGIPVDETERLRAAGIDPVDVLAKAAEAMFNQVFRDGFFHADMHPGNLFIGEGGQLIAMDFGIMGRVDKRTRRFLGEMLLGFLSGDYRKVAEVHFAAGYVPADQSLDTFTQACRSIAEPILGRPLHEISIAKLLGQLFQVTETFAMETQPQLLLLQKSMLVAEGVGRILDPNINMWHLAQPLIEGWMRENLGPEAKIRETLGSVVGSLERLPRLLAETEKTYSMLVNQGLKLHPDTVKAMFPEGGRLRRPSPLLAWIIAAGLAVALYLK

SEQ ID NO: 51110 - protein, 177 aa, Ceratodon purpureus
MAPPTVGTQAQAAPAMVPARVYSKDDEVLVKKSWDILKKDAQRNGINFFRKVFEIAPGAKSMYSFLRDSTIPFEENPKVKNHARYVFMMTGDAAVQLGEKGAYQVLDSKLQKLAATHINAGVTDDQFEIVKEAILYAIEMGVPELWSPELKSAWGDAYDMLAAAVKAEMHAQRAAAQ

SEQ ID NO: 51111 - protein, 236 aa, Candida albicans SC5314
MRSIKSVVVGDGGVGKTCLLISYTTNTFPNDYIPTVFDNYSASVMIDGEPIKLGLWDTAGQSEYDRLRPLSYPQTEIFLCCFSVISPDSFQNVKSKWIPEILHHCPKDILILLIGTKVDLRDDLHVLDELTARNLSPVTFDQGNKLAREIGAIKYMECSAATQVGVKEIFDYAIRAVLDPPNANKGEYVTNDSVPGMGVNNSSGSKKHNEKNGSGTATAGTGKKRKIKRAKKCTIL

SEQ ID NO: 51112 - protein, 296 aa, Zea luxurians
RPEIAHAHQPVMSPSHHGWDGNGAAAVPTPMPKRLDGKVAIVTGGARGIGEAIVRLFAKHGARVVIADIDDAAGEALASALGPQVSFVRCDVSVEDDVRRAVDWALSRHGGRLDVYCNNAGVLGRQTRAARSILSFDAAEFDRVLRVNALGAALRMKHAARAMAPRRAGSIVSVASVAAVLGGLGPHAYTASKHAIVGLTKNAACELGAHGVRVNCVSPFGVATPMLINAWRQGHDDATADADRDLDLDVTVPSDQEVEKMEEVVRGLATLKGPTLRPRDIAEAVLFLASDEARYI

SEQ ID NO: 51113 - protein, 417 aa, Saccharomyces cerevisiae
MSQRLQSIKDHLVESAMGKGESKRKNSLLEKRPEDVVIVAANRSAIGKGFKGAFKDVNTDYLLYNFLNEFIGRFPEPLRADLNLIEEVACGNVLNVGAGATEHRAACLASGIPYSTPFVALNRQCSSGLTAVNDIANKIKVGQIDIGLALGVESMTNNYKNVNPLGMISSEELQKNREAKKCLIPMGITNENVAANFKISRKDQDEFAANSYQKAYKAKNEGLFEDEILPIKLPDGSICQSDEGPRPNVTAESLSSIRPAFIKDRGTTTAGNASQVSDGVAGVLLARRSVANQLNLPVLGRYIDFQTVGVPPEIMGVGPAYAIPKVLEATGLQVQDIDIFEINEAFAAQALYCIHKLGIDLNKVNPRGGAIALGHPLGCTGARQVATILRELKKDQIGVVSMCIGTGMGAAAIFIKE

SEQ ID NO: 51114 - protein, 363 aa, Arabidopsis thaliana
MANNGPNWDGLLKWSLSHSDGASSSSRISEEDRQWFVEAMQAHTIDSISRMKVISQIMKMPEQVLEAQGVTPDDLEGMLAELQEHVESIDLANDLHSIGGLVPLLSYLKNSNAKIRAKSADVLTTVVQNNPRSQQLVMEANGFEPLLTNFIADPDIRVRTKALGAISSLIRNNQPGITAFRLANGYAGLRDALVSDTVRFQRKALNLLHYLLQESNSDCKIVRDLGFPRIMIHLASNQDFEVREFALRGLLELAREESVRNLDRGDVNLRQLLEERTRRIIVMSDEDLCAAREERQLVDSLWTVCYDEPSLLRERGLVYLPSDDELAPDVVRDRFEPPLRAWAARRHDETSESPVPLLLGPAP

SEQ ID NO: 51115 - protein, 343 aa, Candida albicans SC5314
MSTAAVATKPSVTSKPATKQVSNYTKEKKVGEGTYAVVYLGKQISTKRQIAIKEIKTGLFKDGLDMSALREVKYLQELKHPNVIELVDVFSATNNLNLVLEFLPCDLEVLIKDKSIVFKSADIKSWLLMTLRGIHHCHRNFILHRDLKPNNLLLAPDGQLKIADFGLARALVNPNEDLSSNVVTRWYRAPELLFGARHYTGAVDIWSIGIIFAELMLRIPYLPGKDDVDQLDVTFRAYGTPTEQIWPNVSSLPMYNALHVYPPPSRQELRNRFSAATEKALDLLISMTQLDPSRRCDSTLALLHDYFTESPRPTDPKKLPKKSSPEKRENEDEQNNGSKRRHV

SEQ ID NO: 51116 - protein, 488 aa, Anabaena variabilis ATCC 29413
MNRHIQPWQRLLVLAIGSMVFAVFAPTIVQAANTPTLESLSETTIKLQISIDTTWVLLSGFLVFFMQTGFAMLEAGLVRQRSVVNTLLENFIDAAVTVLAWWAVGFGIAFGTSAGGLFGIDTFFLNQLPGADGSYPLGAPGSTAAINTYTLFFFQFAFAATASTITTGSMAGRTDFIGDLIYSAIMGAISYPIIVHWAWNSNGWLGKLSYHDFAGGSIVHTVGGWTALVGAYLLGPRPDRPPWGKLPPAHNLALATLGTMILWFGWYGFNPGSTLGTANPGLIGLVTINTTLAAGAGALTALIFLYVRTGKWDLVYCLNGSLAGLVAITAPCAYVAPWASVLIGFTGGISVVLGVSLIESLHIDDPVGAFSVHGISGMMGTLSIGFLGQAELTLNQKAGLFLGGGFDLLGIQMLGIVAITVFTVAFAFLMYGGLKAVGYLRVNAEADSIGIDAYEHGASVWPDIYPVEEVSKLQDQTKISENKTLEEQ

SEQ ID NO: 51117 - protein, 86 aa, Campylobacter jejuni RM1221
MNFQPLGKRVLVKRVEETKTTASGIIIPDNAKEKPLMGEVVAVSKEITDIANGDKIVFAKYGGTEIKLDNNEYLVLNLDDILGILK

SEQ ID NO: 51118 - protein, 184 aa, Brassica napus
  misc_feature (22)..(22): Xaa can be any naturally occurring amino acid
  misc_feature (175)..(175): Xaa can be any naturally occurring amino acid
  unsure (1)..(184): unsure at all Xaa locations
MVASAFLPELWTEILIPVCAVXGIAFSLFQWFIVSRVRVSADQGASSSSSGGSKNGYGDYLIEEEEGVNDQSVVAKCAEIHTAISEGATSFLFTESRYVGVFMEIFDAIIFVFLGSAEGFSTENKPCTYDETKTCKPALATAAFSTIAFVLGADTSELSGLLGMKIATYANARTXLEARKGFGK

SEQ ID NO: 51119 - protein, 628 aa, Bordetella bronchiseptica RB50
MCGVLGAWWRHHDEHEDARFAAGLRKLAHRGPDDRGSEHFAAPHGRLSLGHTRLAVIDLSAAGHQPMHADADRLAVVFNGEIYNYRELRSELRQIGAIFRGDSDTEVLLAAWQHWGVAALRRFKGMFAFALYDRRQQTLTLARDAFGIKPMYYHAAPERLLFGSELPAVQALLPHPPRLNWQRAYDYLAYGQYDQPPDTFIAGIRQLPAGHLLTLDLRTGRAGEPMAWDDPASQECRPIGFQEAAEELRARFLDNVRLHLRSDVPIGAALSGGIDSSAIVCAMRWLEPDLPIQTFSFISDDTHRSEERWVDLVNQHCGATGHKIHIAPHELLDDLDDLIRVQGEPVGSTSIYAQYRVFKLAREHGVVVTLDGQGADELLGGYGGYPTERLASLLETGRLGAAARLLRQQGRGAPARLLQAAALAAGGRHLANLRHATGRQHAPAWLDAQVLRDQGVTMREPAHAWAAATPLRGRRLVNELAHALYHRGLGALLRHGDRNSMRFSVESRVPFLTQDLAEFALSLPERYLVSDAGQTKHIFRKAMRGIVPDSILDRDDKIGFATPEQQWMQATAPQMRQWLVDAADIPFLRNAEVTAQFDAMIAGATPFSWQAWRWVNFQRWMQHATVLP

SEQ ID NO: 51120 - protein, 343 aa, Nicotiana tabacum
MGSNLVDEIDCGSFFDHIDDLIEFPLENEGAGLSSTDCKDFPTIWNDPLPDSDSLFSGSHRNSASDFSAELSVPYEDIVQLEWLSAFVEDSFSGGGLTLGKDNFPLNKETSEAKFQTSSPVSVLESSSSSSSSSCSVEKTVPLSSPCHRGPQRARSKRPRPATFNPAPAIQLISPTSSFTEIPQPFVAPKITSESENFAESPMKKILKPAVAEQKTKKKLKLSFPSSLVKTNQNPVAQTIRKCQHCEITKTPQWRAGPMGPKTLCNACGVRYKSGRLFPEYRPAASPTFVPAIHSNSHKKVIEMRTKVVPDNNATIARTAPPATVTQPEFNPSNEDSVEEENK

SEQ ID NO: 51121 - protein, 518 aa, Anabaena variabilis ATCC 29413
MYQQKSRTRNRRFSTRNYAKSRQSNSQIQIFNLVKKLSPSWQACIPLACLIVLGWSYVAVAQAPAAGPTTAELKVALDTLWVAIAAFLVFFMNAGFGMLETGFCRQKNAVNVLAKNLIVFALATVAFWAIGFGLMFGDGNDFIGFNGFFLSGEDNSPATGDAYKGVFSALSWAGVPLAAKFLFQLVFAGTAATIVSGAVAERIKFVDFLIFSLLLVGIAYPITGHWIWGAGWLADRGFWDFAGSTVVHSVGGWAALMGAAFLGPRIGKYQDKQVVALPGHNMSIATLGCLILWLGWFGFNPGSVMAADPNAITHIALTTNMAGAVGGIAATITAWLYLGKPDLSMIINGILAGLVGITASCAYVSIPSSAIIGFIAGVIVVFAVTFFDKLGIDDPVGATSVHLVCGVWGTLAVGLWSVGPGVYSWYGEGLGPAKGLFAGGGLGQLITQFLGAAAVGGMTVLVSSIFWLALKATLGIRVTREEELEGLDIGEHGMEAYSGFLKEASPGGFAEGKTSDGY

SEQ ID NO: 51122 - protein, 545 aa, Campylobacter jejuni RM1221
MAKEIIFSDEARNKLYEGVKKLNDAVKVTMGPRGRNVLIQKSFGAPSITKDGVSVAKEVELKDSLENMGASLVREVASKTADQAGDGTTTATVLAHAIFKEGLRNITAGANPIEVKRGMDKACEAIVAELKKLSREVKDKKEIAQVATISANSDEKIGNLIADAMEKVGKDGVITVEEAKSINDELNVVEGMQFDRGYLSPYFITNAEKMTVELSSPYILLFDKKIANLKDLLPVLEQIQKTGKPLLIIAEDIEGEALATLVVNKLRGVLNISAVKAPGFGDRRKAMLEDIAILTGGEVISEELGRTLESATIQDLGQASSVIIDKDNTTIVNGAGEKANIDARVNQIKAQIAETTSDYDREKLQERLAKLSGGVAVIKVGAATETEMKEKKDRVDDALSATKAAVEEGIVIGGGAALIKAKAKIKLDLQGDEAIGAAIVERALRAPLRQIAENAGFDAGVVVNSVENAKDENTGFDAAKGEYVNMLESGIIDPVKVERVALLNAVSVASMLLTTEATISEIKEDKPTMPDMSGMGGMGGMGGMM

SEQ ID NO: 51123 - protein, 243 aa, Bacillus licheniformis
MSYRVKRMLMLLVTGLCLSLSTFTAGASAQTGGSFYEPFNNYNTGLWQKADGYSNGNMFNCTWRANNVSMTSLGEMRLSLTSPSYNKFDCGENRSVQTYGYGLYEVSMKPAKNIGIVSSFFTYTGPTDGTPWDEIDIEFLGKDTTKVQFNYYTNGVGNHEKIVNLGFDAANSYHTYAFDWQPNSIKWYVDGQLKHTATTQIPQTPGKIMMNLWNGAGVDEWLGSYSGVTPLSRSLHWVRYTKR

SEQ ID NO: 51124 - protein, 289 aa, Nicotiana tabacum
MKMEALDPSAASCFMVDVDDDLLNFSLEDETVFDDDEKTTKSITKHKHPLSSSYSSSLDSSNPVLSLLPSQQHPECVEEELEWLSNKDAFPAVEFGILADNPSIVFDHHSPVSVLENSSSTCNSSGNGSANANAYMSCCASLKVPVNYPVRARSKRRRRRQRGSFADLPSEHCMSVNKPSFKSVKQREPLLSLPLNSAKSASIGRRCQHCGADKTPQWRAGPLGPKTLCNACGVRYKSGRLLPEYRPANSPTFSPTVHSNSHRKVLEMRKQKIGVGGMMIHEACGYRVG

SEQ ID NO: 51125 - protein, 285 aa, Glycine max
  misc_feature (102)..(102): Xaa can be any naturally occurring amino acid
  unsure (1)..(285): unsure at all Xaa locations
MAKHDVEGGSFSAKDYHDPPPAPLIDAEELTQWSFYRALIAEFIATLLFLYITVLTVIGYKSQSDVKAGGDVCGGVGILGIAWAFGGMIFILVYCTAGISGXHINPAVTFGLFLARKVSLIRAIMYMVAQCLGAICGVGLVKAFQKAYYNRYGGGANELSEGYSTGVGLGAEIIGTFVLVYTVFSATDPKRNARDSHVPVLAPLPIGFAVFMVHLATIPVTGTGINPARSLGAAVMYNQQKAWDDHWIFWVGPFIGAAIAAFYHQFILRAGAAKALGSFRSNPTI

SEQ ID NO: 51126 - protein, 256 aa, Nicotiana tabacum
MDVYGVSAPDLFRIDDLLDFSNDEIFSINSNSSSTTATPDSQHHHHQPHSDNSSAATANYYDALLPNCSDDFTDNLCVPSDDVAELEWLSNFVEDSFSNFPTNSITGTMNLSSNSTASFHSRSRSKRSRSTSSWTSSLQNPNTTMKNKEISVHTRERSSSMDDDVPRRCTHCASEKTPQWRTGPLGPKTLCNACGVRFKSGRLVPEYRPAASPTFVLTQHSNSHRKVMELRRQKEMVHQQPPPTEEGMYGNHFRVC

SEQ ID NO: 51127 - protein, 334 aa, Clostridium thermocellum
MKNRVISLLMASLLLVLSVIVAPFYKAEAATVVNTPFVAVFSNFDSSQWEKADWANGSVFNCVWKPSQVTFSNGKMILTLDREYGGSYPYKSGEYRSKSFFGYGYYEVRMKAAKNVGIVSSFFTYTGPSDNNPWDEIDIEFLGKDTTKAQFNWYKNEVGGNEYLHNLGFDASQDFHTYGFEWRPDYIDFYVDGKKVYRGTRNIPVTPGKIMMNLWPGKGVDEWLGRYDGRTPLQAEYEYVKYYPNGVPQDNPTPTPTIAPSTPTNPNLPLKGDVNGDGHVNSSDYSLFKRYLLRVIDRFPVGDQSVADVNRDGRIDSTDLTMLKRYLIRAIPSL

SEQ ID NO: 51128 - protein, 483 aa, Zea mays
MSYNKAPSITAETINPRVKIIRYAPCGEIVKHAARLEQEIEENPASIPFQEVKTPPLCSKQVLSLCDNPALMDRDEARALFSPCSIRRARRILNSIPSKDTGGYTDCRGIKCLRQVVADGITARDGFPSTADDIFLTDGATSAINLMMQILIRSHEDGILSPLPEYPLYSASIILHGGTMVPYNLTEDNGWGLEIFEVKRCLEEARSAGLTVRAMVVINPGNPTGQVLSVTNQEEIVEFCRKEGLVILADEVYQENIYAENKKFHSFKKVARSLAYDENDLTLVSLHSVSMSYGESGRRGGYMEVSGVAANVKDQIYKVASLTLCPNIAGQILVSLAMDPPKLGDESFESFDKEKEQIRSSFCKRAKTLEKAFSGLEGVTCNKLEGALYLFPRLHLPSAAIRAADFEGVSPDIFYAHRLLDATGIAVVPGSGFHQASGTIHIRCTILPDERKIEAMVARLRAFHKAFMNEFRGSQQVMNDLRR

SEQ ID NO: 51129 - protein, 178 aa, Triticum aestivum
  misc_feature (33)..(33): Xaa can be any naturally occurring amino acid
  misc_feature (95)..(95): Xaa can be any naturally occurring amino acid
  misc_feature (99)..(99): Xaa can be any naturally occurring amino acid
  misc_feature (151)..(151): Xaa can be any naturally occurring amino acid
  unsure (1)..(178): unsure at all Xaa locations
MVLSHAASAGSSDDSVHSTFASRYVRASLPKFXMPENSIPKEAAYQIINDELMLDGNPRLNLASFVTTWMEPECNKLMMDSINKNYVDMDEYPSXELQXRCVNMIAHLFNAPPGETRTPWGWAPSGFWRAHLSAGVGFRRGWGKKIKAAGXPFKKPKFYRGKISILWEKISPPFLRGA

SEQ ID NO: 51130 - protein, 526 aa, Anaplasma platys
MANTVVTGKVLDKSIREVVRTLEDAVGCTAGPKGLTVAISKPYGSPEITKDGYKVMKSIKPEEPLAAAIASIITQSASQCNDKVGDGTTTCSILTAKVIEEVARAKAAGADIVSIKNGILKAKEAVLTALMSMRREVEEEEIAQVATISANGDKNIGSKIAQCVKEVGRDGVITVEESKGFKDLEVEKTDGMQFDRGYLSPYFVTNAEKMLVEFENPYIFLTEKKINVVQHILPILENVARSGRPLLIIAEDVEGEALSTLVLNKLRGGLQVAAVKAPGFGDRRKDMLGDIAVIAGAKYVVNDELAVKMEDISLSDLGTAKNVRITKDTTTIIGSVDSNSEVIASRTNQIKAQMESSTSDYDKEKLKERLAKLCGGVAVLKVGGSSEVEVKERKDRVEDALHATRAAVEEGVVPGGGAALLYTLSSLDSLKGKNDDEQLGINIIRRAACAPIKRIIKNSGSEEAPCVIQHLLKQNDKELIYNVDTMNYANAFTSGVMDPLKVVRIAFDLAVSLAAVFMTLNAVVVD

SEQ ID NO: 51131 - protein, 395 aa, Vibrio fischeri ES114
MSDFPLYIHACGSHSAMGKEVDEIHQVLSGNKAPSMHKETGWLNNGKATVVGKALGELPLVPEHLAHWDTRNNQLVLSALQQIEPQINAAKEKYGSDRIAVIVGTSTSGISDGEVALKEKMEQGAFPAGYSYKQQELGNPADFIAQYLDINGPTYAISTACSSSGRVFLSAKRLLKAGFVDAVIVGGTDSLCRLTLNGFNSLEALSNEYCLPFSPNRKGINIGEASAYMLLSAEQKDSDDPIALLGAGDSSDAHHISAPHPEGKGAIEAMNKALTDAGLEPKDIGYINAHGTATPLNDAMESKAVHAVFGHSVPVSSTKPFTGHTLGAAGIIEASICWHILKYNLPLPKQINDGQQDDALADIQLVVDQPLRKKAVISNSFAFGGNNISLIFGCI

SEQ ID NO: 51132 - protein, 323 aa, Solibacter usitatus Ellin6076
MKAIQVLTPGGPESLHLLDAPVPRLGPDQALVKVAASGVNFIDVYFRTGLYKADAPIAIGSEAAGTVEAVGAGVTEFKPGDRVAYAMVRGSYAEYAVVPVGMLVKIPDHVDFVTAAAAMLQGMTAHYLTHSTYLLKAGQACLVHAAAGGTGSLIVQMAKMLGARVFGTVSTEDKARIAREAGADETILYTQQEFDVEVKRLTQGRGVDVVYDSVGKTTFEKSLNSLRPRGTLALFGQSSGPVPPFDPTILNGKGSLYLTRPSLAHYMMTRDELLWRATDVLKWIDSGQLKLRIDRTYPLADAASAHRDLESRKTAGKLVLAVS

SEQ ID NO: 51133 - protein, 411 aa, Vibrio fischeri ES114
MSRRVVVTGMSGVTALGSDWNTVGENLRKCENATQYMPSFEVYDGLNTKLAAPINDFTLPKHYTRKKIRSMGRVSLLSTVASEQALEQSGLIGNDILTNGQTGIAFGSSTGSTDAVGAFGVMLNEKSTRAITATTYVQMMPHTAAVNVGLFFGLRGRVIPTSSACTSGSQAIGYAYEAIKHGYQTAMVAGGAEELCPTESAVFDTLFATSLKNDAPKTSPSPYDQDRDGLVIGEGAGALVLEEYEHAKARGATIYAELVGFASNCDAAHVTQPQMETMQMCMEMSLRDANLAPEKIGYVSAHGTATERGDIAESTATENVFGSSMPISSLKSYFGHTLGACGAIEAWLSIEMMRNNWFSPTLNLNNVDERCGKLDYITGTGREIECDYIMSNNFAFGGINTSLIFKRWTEE

SEQ ID NO: 51134 - protein, 464 aa, Legionella pneumophila str. Lens
MVLEFDTIILGGGKGGKTLAMDLAKSGQKIAMVENNQIGGTCINVACIPTKTLVQSAKVAHYCRKAKDYGLNTTLSPIDFKAIRARKDAVVNGMREANLKQFLDSGMDLMLGHGHFIGPKMIEVTLSSPRDNQKTLHITADKIIINTGALPYTPPIAGLDKVNYFTNDSLMNTDSVPQHLLIIGGGYIGLEFAQMFRRFGAEVTAIEASSEFLGREDKDIAEQVFQILSNEGIQFAVDTKINAIRQEKTEVIIEANRQGQSEIIRGTAVLVAVGRIANTAGLHLDRTGVELDERGFIKVNEFLETTAAGIWALGDVKGGAQFTHLSLDDYRLVKHNLQNPQKKLSSQNRLIPYTVFLDPELARIGLTEAQARSQGRPIKIATIPAAAIPRAKTQGETTGVLKAVIDAETDLILGVSIFCAEAGEILGVIQLAMELRVPYQKLRDMMFAHPTLVEGINLWFAQII

SEQ ID NO: 51135 - protein, 296 aa, Zea luxurians
RPEIAHAHQPVMSPSHHGWDGNGAAAVPTPMPKRLDGKVAIVTGGARGIGEAIVRLFAKHGARVVIADIDDAAGEALASALGPQVSFVRCDVSVEDDVRRAVDWALSRHGGRLDVYCNNAGVLGRQTRAARSILSFDASEFDRVLRVNALGAALGMKHAARAMAPRRAGSIVSVASVAAVLGGLGPHAYTASKHAIVGLTKNAACELGAHGVRVNCVSPFGVATPMLINAWRQGHDAATADADRDLDLDVTVPSDQEVEKMEEVVRGLATLKGPTLRPRDIAEAVLFLASDEARYI

SEQ ID NO: 51136 - protein, 271 aa, Debaryomyces hansenii CBS767
MVDINVEGKNALITGGTRGLGLHIAESFVLNGASTVIITSRKKDACESAQRELEKIAVDNQKQVKIIAIPCDISVEENVKEFFRQASKQIDRLDILIANAGATYGAPLKDHPLSAMKKVIHLNITGVFHTIQLFTPLLESSGAKSDPSRIIIVSSVASFVATDFGGTYGYLASKAGVAHLGKNLALQLAPRNVNVNTIAPGFFPTKMTKGLMAANTSEMVEGNPLKRLGTKSDIQNSVLWLCSKQSNYINGIVLPIDGGLHLVGTSNLAHL

SEQ ID NO: 51137 - protein, 473 aa, Pseudomonas aeruginosa
MAAKVLLVEDDRALREALSDTLLLGGHEFVAVDSAEAALPVLAREAFSLVISDVNMPGMDGHQLLGLIRTRYPHLPVLLMTAYGAVDRAVEAMRQGAADYLVKPFEARALLDLVARHALGQLPACEEDGPVALEPASRQLLELAARVARSDSTVLISGESGTGKEVLANYIHQQSPRAGKPFIAINCAAIPDNMLEATLFGHEKGSFTGAIAAQPGKFELADGGTILLDEISEMPLGLQAKLLRVLQEREVERVGARKPINLDIRVLATTNRDLAAEVAAGRFREDLYYRLSVFPLAWRPLRERPADILPLAERLLRKHSRKMNLGAVALGPEAAQCLVRHAWPGNVRELDNAIQRALILQQGGLIQPADLCLTAPIGMPLAAPVPVPMPAMPPATPPSVEIPSPAAGQDASGALGDDLRRREFQVIIDTLRTERGRRKEAAERLGISPRTLRYKLAQMRDAGMDVEAYLYAI

SEQ ID NO: 51138 - protein, 422 aa, Saccharomyces cerevisiae
MVDLIARDDSVDTCQASNGYNGHAGLRILAVFIILISSGLGVYFPILSSRYSFIRLPNWCFFIAKFFGSGVIVATAFVHLLQPAAEALGDECLGGTFAEYPWAFGICLMSLFLLFFTEIITHYFVAKTLGHDHGDHGEVTSIDVDAPSSGFVIRNMDSDPVSFNNEAAYSIHNDKTPYTTRNEEIVATPIKEKEPGSNVTNYDLEPGKTESLANELVPTSSHATNLASVPGKDHYSHENDHQDVSQLATRIEEEDKEQYLNQILAVFILEFGIIFHSVFVGLSLSVAGEEFETLFIVLTFHQMFEGLGLGTRVAETNWPESKKYMPWLMGLAFTLTSPIAVAVGIGVRHSWIPGSRRALIANGVFDSISSGILIYTGLVELMAHEFLYSNQFKGPDGLKKMLSAYLIMCCGAALMALLGKWA

SEQ ID NO: 51139 - protein, 296 aa, Zea luxurians
RPEIAHAHQPVMSPSHHGWDGNGAAAVPTPMPKRLDGKVAIVTGGARGIGEAIVRLFAKHGARVVIADIDDAAGEALASALGPQVSFVRCDVSVEDDVRRAVDWALSRHGGRLDVYCNNAGVLGRQTRAARSILSFGASEFDRVLRVNALGAALGMKHAARAMAPRRAGSIVSVASVAAVLGGLGPHAYTASKHAIVGLTKNAACELGAHGVRVNCVSPFGVATPMLINAWRQGHDAATADADRDLDLDVTVPSDQEVEKMEEVVRGLATLKGPTLRPRDIAEAVLFLASDEARYI

SEQ ID NO: 51140 - protein, 540 aa, Oryza sativa (japonica cultivar-group)
MSARPPPPPRPRLALPPRSAAESLFTGAGDASPGPLTLASALFPSDPDGGGGGGGVMTSSSSSAAGATSFTQLLIGNLSAPPPPPPPPQQQQQREAARGGGVARAGPALSVAPPPTAGSVFTVPPGLSPSGLLDSPGLLFSPAMFDAFDVLDMFIPDKILPKRATRIKLDIYFVKTSPEGGFGMSHREALAQVTAQASHSPLRMFDHTEQPSFSAAPTSSEAMQHMNAAVNMTGISDMVMGPTNNENVAFQPAEASQRYQVNAPVDKPADDGYNWRKYGQKVVKGSDCPRSYYKCTHPNCPVKKKVEHAEDGQISEIIYKGKHNHQRPPNKRAKDGSSSAADQNEQSNDTVSGLSGIKRDQEAIYGMSEQLSGLSEGDDMDDGESRPHEADDKESDSKKRNIQISSQRTSAEAKIIVQTTSEVDLLDDGYRWRKYGQKVVKGNPHPRSYYKCTYAGCNVRKHIERASSDPKAVITTYEGKHNHEPPVGRGNNQNAGNAAPSSSAQQNMQNLSSNQASLTMADFNNINQRPIGVLQFKSEE

SEQ ID NO: 51141 - protein, 504 aa, Malus x domestica
MDLLLLEKTLLGLFVAVIVAIAISKLRGKKFKLPPGPIPVPVFGNWLQVGDDLNHRNLTDMAKKFGDCFLLRMGQRNLVVVSSPELAKEVLHTQGVEFGSRTRNVVFDIFTGEGQDMVFTVYGEHWRKMRRIMTVPFFTNKVVQQYRYGWESEAAAVVEDVKKHPEAATSGMVLRRRLQLMMYNNMYRIMFDRRFESEEDPLFVKLKALNGERSRLAQSFDYNYGDFIPILRPFLRGYLKICKEVKEKRIQLFKDYFVDERKKLSSTKPTTNEGLKCAIDHILDAQQKGEINEDNVLYIVENINVAAIETTLWSIEWGIAELVNHPEIQKKLRNELDTVLGRGVQITEPDVPKLPYLQAVVKETLRLRMAIPLLVPHMNLQDAKLGGFDIPAESKILVNAWWLANNPALWKKPEEFRPERFLEEESKVEANGNDFRYLPFGVGRRSCPGIILALPILGITIGRLVQNFELLPPPGQSKLDTSEKGGQFSLHILKHSTIVMKPRA

SEQ ID NO: 51142 - protein, 195 aa, Zea mays
  misc_feature (110)..(110): Xaa can be any naturally occurring amino acid
  misc_feature (166)..(166): Xaa can be any naturally occurring amino acid
  unsure (1)..(195): unsure at all Xaa locations
MQIFVKTLTGKTITLEVESSDTIDNVKAKIQDKEGIPPDQQRLIFAGKQLEDGRTLADYNIQKESTLHLVLRLRGGMQIFVKTLTGKTITLEVESSDTIDNVKTKIQDKXEGIPPDQQRLIFAGKQLEDGRTLADYNIQKESTLHLVLRLRGGMQIFVKTLTGKTXTLEVESSDTIDNVKAKIQDQGRIPPDQQR

SEQ ID NO: 51143 - protein, 1411 aa, Arabidopsis thaliana
MASSLKKLISSFLLVLYSTTIIVASSESRCRRFKSIISFGDSIADTGNYLHLSDVNHLPQSAFLPYGESFFHPPSGRASNGRLIIDFIAEFLGLPYVPPYFGSQNVSFEQGINFAVYGATALDRAFLLGKGIESDFTNVSLSVQLDTFKQILPNLCASSTRDCKEMLGDSLILMGEIGGNDYNYPFFEGKSINEIKELVPLIVKAISSAIVDLIDLGGKTFLVPGGFPTGCSAAYLTLFQTVAEKDQDPLTGCYPLLNEFGEHHNEQLKTELKRLQKFYPHVNIIYADYHNSLYRFYQEPAKYGFKNKPLAACCGVGGKYNFTIGKECGYEGVNYCQNPSEYVNWDGYHLTEAAYQKMTEGILNGPYATPAFDWSCLGSDTGNILHLSDVNHLPQTAFFPYGESFFHPPSGRASDGRLIIDFIAEFLGLPYVPPYFGSQNVSFEQGINFAVYGATALDRAYFVAKGIESDFTNVSLGVQLDIFKQILPNLCASSSRDCREMLGDSLILMGEIGGGKTFLVPGGFPAGCSAACLTQYQNATEEDYDPLTGCIPRLNELGEHDNEQLKTELKRLQKLYPDVNIIYADYHNSLYRFYQEPAKYGFKNKPLAACCGVGGKYNFTIGKECGYEGVSYCQNPSEYVNWDGYHLTEAAYQKMAEGILNGPYATPAFDWSCLGSESRCRRYKSIISFGDSIADTGNYVHLSNVNNLPQAAFLPYGESFFHPPSGRYSDGRLVIDFIAEFLGLPYVPPYFGSQNVSFNQGINFAVYGATALDRAFLVKQGIKSDFTNISLSVQLNTFKQILPNLCASSTRDCREMLGDSLILMGEIGGNDYNYPFFEGKSINEIKELVPLIIKAISSAIVDLIDLGGKTFLVPGNFPIGCSTAYLTLFQTATVEHDPFTGCIPWLNKFGEHHNEQLKIELKQLQKLYPHVNIIYADYYNSLYGLFQEPAKYGFKNRPLAACCGVGGQYNFTIGKECGENGVSYCQNPSEYVNWDGYHLTEATYQKMAQGLLNETTKTILPMASSLEKLISSFLLVLYSTTIIVASSESRCRRFKSIISFGDSIADTGNYLHLSDVNHLPQSAFLPYGESFFHPPSGRYSDGRLIIDFIAEFLGLPYVPSYFGSQNVSFDQGINFAVYGATALDRVFLVGKGIESDFTNVSLSVQLNIFKQILPNLCTSSSRDCREMLGDSLILMGEIGVNDYNYPFFEGKSINEIKQLVPLVIKAISSAIVDLIDLGGKTFLVPGNFPLGCYPAYLTLFQTAAEEDHDPFTGCIPRLNEFGEYHNEQLKTELKRLQELYDHVNIIYADYYNSLFRLYQEPVKYGFKNRPLAACCGVGGQYNFTIGKECGHRGVSCCQNPSEYVNWDGYHLTEATHQKMAQVILNGTYASPAFDWSCSGSESVDKEYSFSS

SEQ ID NO: 51144 - protein, 222 aa, Brassica napus
  misc_feature (166)..(166): Xaa can be any naturally occurring amino acid
  misc_feature (193)..(193): Xaa can be any naturally occurring amino acid
  misc_feature (212)..(212): Xaa can be any naturally occurring amino acid
  unsure (1)..(222): unsure at all Xaa locations
MGKGPLSFRRLSSIRRRKKGSSVKDDPNQSSNPSSPPPPSPINAGGSVAAGTTGKVKKKAGGARLWMRFDRTGAMEVVECDKSTIIKRSSVPARDLRILGPVFSHSSNILAREKAIVVNLEVIKAIVTAEEVLLLDPLRPEVLPFIDRLKQQFPQRNALEATPNVXTFDPEAGEGLQSELPFEFQVLEMALEXVCSIVDTSVASLETDAWPXLDELTKNVST

SEQ ID NO: 51145 - protein, 342 aa, Nicotiana tabacum
MGSNLVDEIDCGSFFDHIDDLIDFPLENESAGLSSTDCKDFPSIWNDPLPDSDSLFSGSHRNSASDFSAELSVPYEDIVQLEWLSTFVEDSFSGGGLTLGKENFPLYKETSEAKFQTSSPVSVLESSSSSSSSSCSVEKTVPLSSPCHRGPQRARSKRPRPATFNPAPVIQLISPTSSFTEIPQPFVARGIASESENFAESPMKKILKPAVAEQKKKKLKLSFPSARVEANQNPVAQTIRKCQHCEMTKTPQWRAGPMGPKTLCNACGVRYKSGRLFPEYRPAASPTFVPSIHSNSHKKVIEMRTKFVPDNNANIARTAPPATVTQPEFNPSNKESVEEENK

SEQ ID NO: 51146 - protein, 823 aa, Arabidopsis thaliana
MASLDSLVIFLFSTLFVTIVSSETPCPNFKSIISFGDSIADTGNLVGLSDRNQLPVTAFPPYGETFFHHPTGRSCDGRIIMDFIAEFVGLPYVPPYFGSKNRNFDKGVNFAVAGATALKSSFLKKRGIQPHTNVSLGVQLKSFKKSLPNLCGSPSDCRDMIGNALILMGEIGGNDYNFPFFNRKPVKEVEELVPFVIASISSTITELIGMGGKTFLVPGEFPIGCSVVYLTLYKTSNKDEYDPSTGCLKWLNKFGEYHSEKLKVELNRLRKLYPHVNIIYADYYNSLLRIFKEPAKFGFMERPFPACCGIGGPYNFNFTRKCGSVGVKSCKDPSKYVGWDGVHMTEAAYKWIADGILNGPYANPPFDRSCLRSEIKKESLYNQTTCQHQFRYSAKESLPNLCGSPSANRKEKEYNLPASPMASLDSLPAMKLVRFILSTLLVTSVNSQTQCRNFKSIISFGDSIADTGNLLGLSDPNDLPASAFPPYGETFFHHPTGRYSDGRLIIDFIAEFLGFPLVPPFYGCQNANFKKGVNFAVAGATALEPSFLEERGIHSTITNVSLSVQLRSFTESLPNLCGSPSDCRDMIENALILMGEIGGNDYNFALFQRKPVKEVEELVPFVIATISSAITELVCMGGRTFLVPGNFPIGYSASYLTLYKTSNKEEYDPLTGCLKWLNDFSEYYNKQLQEELNGLRKLYPHVNIIYADYYNALLRLFQEPAKFGFMNRPLPACCGVGGSYNFNFSRRCGSVGVEYCDDPSQYVNYDGIHMTEAAYRLISEGLLKGPYAIPPFKWSCLSSEIMNKMSLDTQILDEQLLQGCLKV

SEQ ID NO: 51147 - protein, 442 aa, Bradyrhizobium japonicum USDA 110
MLDETAGRAPGGAARWWLAQSLRALGAEIAARGGSLILRKGPAAGVIPEEARESGARAVYWNGIAQAPHQAIERRLEAALAKLGVDSQSFPGDLLVPPSAIRNKEGRGLRVFTPFWRRVLSLGDPPKPLPAPKQLRPGPKIVSDRLESWQLAPTKPDWAGGLRERWTPGEASARARLRDFLKTIARGYAGDRDRPDRVGTSGLSPHLRFGELSPRQVWHAARFAAAEDAALGPGIEKFLSELGWREFCRHLLHDHPDLATENLQTNFDGFPWQSDGKVLAAWQRGRTGYPIVDAGLRELWHTGVMHNRVRMVVASFLVKHLLIDWRDGEAWFWDTLVDADAGSNPANWQWVAGCGADAAPYFRVFNPQLQGEKFDPDGTYVRRWVPELQGLPAKLIHQPWQATPNELASAGVTLGKTYPQPIVDHARGRERALSAYAKIRKG

SEQ ID NO: 51148 - protein, 383 aa, Ipomoea batatas
GTVAGEALVTHEEFIMAMPGNYQTAIAEAEAEMGTKFGCFLTDSFLWFGGDLAAERGGVPWISFWTAGACSISAHLYTDFVRSLVAATPNANGNGLDQKLKVIPGMSEVSIGEMPGEILAKDLQAPFPGMIYNMALKLPGANALVLNSFQKLEPTVTDDLRSKVQVFNIGPMILQPATPKPPISDDHNCIPWLDSLPPASSAVYLSFGSGITPPPDEIVGLAKALEAKRAPFLWSLKPHGVKHLPEGFVERTKEFGKIVPWAPQVQVLSHPGVGVFVTHCGWNSTLEAISCGVCMICRPFYGDQKINTRFVESVWEIGVKIEGGIFTKDGTMKALNVVLDSDRGKLLKENVVKLKGEALEAVKPNGSSTKDFQELVHLLNDSF

SEQ ID NO: 51149 - protein, 136 aa, Triticum aestivum
MVSSMKHCRDQAQEEPLSLSLSLGAMADRTKKQRRGVAAGEFVCKTCSRAFPSFQALGGHRTSHLRGHNGLALGLAAGSDQPGTKKTTDQKQAHQCHVCGLEFEMGQALGGHMRRHREQEAATTAQAPPVLLQLFV

SEQ ID NO: 51150 - protein, 549 aa, Rubrobacter xylanophilus DSM 9941
MGGRSGNLRRFAQIGRVLVRHGFGFVFDARRERREERGLQEVLAPSFGARLRRALDDLGPTFVKFGQLLSTRSDILPESVLAELRKLQDTVAPMPPGAAQAIVERELGAPVERLFESFDPEPLGSASIGQVHRAVLRDGRVVAVKVQRPEARPRVESDLELMRELAAFIDRRFGERIFVDVPGLVAEFEGVIRRELDYTAEAENARRFRANFAGSRVRIPAVHTDLSTSRVLTLEYVEGTRFYAIRPLLLRPSERRRVAELGAEAIFRMAFEHGFFHGDPHPGNLILTPEGDLALLDFGMVGFLSRGDIDALGRLFVAVIDRDAPAVLVGLEELGVQYAPEVRADLVQDVGEFLHKYSGLSVGEVTLGQALSELISLARRYRLRVPPVFPLLTKALVTAEGIARSIDPTLNVYEVARPYARRLLLGRYRPRAVGEAVEERALEYARYAEDYPEQVRQLLSELADGELEVRLRHRGLDNLAGEVDVLANRLVFAVVTGALIVGSSVLGAFELGGPAVPYIGVPLVSFVGFSLAIALASVVLVIIFRSGRL

SEQ ID NO: 51151 - protein, 277 aa, Bacillus clausii KSM-K16
MIPTVTLKDGLQLPAIGFGTYALNGAAGVNAMVSAIDIGYRLLDSAFNYENEGAVGEAIRRSSVPRAQLRVTSKLPGRRQAYAQAIVTIQESLLRARLDYYDLYLIHWPNPKTDLYVEAWQALIDAQKWGLIRSIGVCNFLPEHLERLERETGVMPSINQIELHPYFSQESQRVWDNNHHIVTESWSPLGRASSVLQDKVIKQIAATHRKSVSQIILRWHVQLGAIPLPKSASPERQLENIAIFDFSLSTEEMEQINKLTKADGRIQNQDPAEYEEF

SEQ ID NO: 51152 - protein, 368 aa, Pelargonium x hortorum
MGVLLNICSSPFPVVASAASTSISKVNHIRKVGVTGVMAPQKIEIFKSMEEWGKHNILPLAKPVEKSWQPTDFLPDPSSEGFMEEYNAFKERTRELPDEYFVVLAGDMITEEALPTYQTLVNRPDEVADETGHSESPWAVWSRAWTAEENRHGDLLNKYLYLSGKLDMRQVEKTIQYLIALGQDIGTEKNPYHLFIYTSFQERATFISHANTAKLAQQHGDKQLAQICGTIAADEKRHETAYTRIVDKLFELDPDETMSCLAHMMKRKITMPAHLMRDGRDPHLFQHFSVVASRTGVYTVMDYINILEHFVEKWNIEKITAGLSDKGREAQDYVCKLGERLRKVEERAHQRVVQADPIPFSWIFDRKV

SEQ ID NO: 51153 - protein, 765 aa, Arabidopsis thaliana
MASHIVGYPRMGPKRELKFALESFWDGKSTAEDLQKVSADLRSSIWKQMSAAGTKFIPSNTFAHYDQVLDTTAMLGAVPPRYGYTGGEIGLDVYFSMARGNASVPAMEMTKWFDTNYHYIVPELGPEVNFSYASHKAVNEYKEAKALGVDTVPVLVGPVSYLLLSKAAKGVDKSFELLSLLPKILPIYKEVITELKAAGATWIQLDEPVLVMDLEGQKLQAFTGAYAELESTLSGLNVLVETYFADIPAEAYKTLTSLKGVTAFGFDLVRGTKTLDLVKAGSPEGKYLFAGVVDGRNIWANDFAASLSTLQALEGIVGKDKLVVSTSCSLLHTAVDLINETKLDDEIKSWMAFAAQKVVEVNALAKALAGQKDEALFSANAAALASRRSSPRVTNEGVQKAAAALKGSDHRRATNVSARLDAQQKKLNLPILPTTTIGSFPQTVELRRVRREYKAKKVSEEDYVKAIKEEIKKVVDLQEELDIDVLVHGEPERNDMVEYFGEQLSGFAFTANGWVQSYGSRCVKPPVIYGDVSRPKAMTVFWSAMAQSMTSRPMKGMLTGPVTILNWSFVRNDQPRHETCYQIALAIKDEVEDLEKGGIGVIQIDEAALREGLPLRKSEHAFYLDWAVHSFRITNCGVQDSTQIHTHMCYSHFNDIIHSIIDMDADVITIENSRSDEKLLSVFREGVKYGAGIGPGVYDIHSPRIPSSEEIADRVNKMLAVLEQNILWVNPDCGLKTRKYTEVKPALKNMVDAAKLIRSQLASAK

SEQ ID NO: 51154 - protein, 351 aa, Sulfolobus solfataricus P2
MHKTAFIWTDEYYNYSFPDYHPFKSLRESMTKRLLEERGAFHFITLVEPKSIPEEALQLVHSKEYIEFVKYKSKEGQGYLDDGDTPAFKGIYEAALIRVSGSVKALELIKSGEFNHTINIGGGFHHAKRNRAAGFCVFNDVALISKLGESFFSRIAIVDIDGHHADGTQELLIDDNNILKISLHMFHPNFFPGTGDVNEIGLGKGEGYTINIPLPPGTGDDGYLLAFDEIVVPAIERYKPELIILVAGGDSHFNDPLVELKLSTHGYLDVVTKIHRLVHEYSNGRLIMLGGGGYNYDATARIWTISIAEIAGIYDLEYETLHDSFSTKSSQFVMEKIRNTISLIKKIHSLN

SEQ ID NO: 51155 - protein, 725 aa, Anabaena variabilis ATCC 29413
MKLLIVENDRDTAAALTTSLVAQQFTVDTASDSRSALELAEATEYDLIVLDVMLPDENGIRLCRQLRTQNQQEPILLLTRKVNPADRIAGFEAGADDYITKPYELSELLARIRALLRRGSTVLTKVLCWGQLQLDPNNCEVMCQGKGLHLTPKEYKLLELFLRHPRRIFDRRTLLDRICSIDECPGEEAITTQIRGLRRKLQMAGLNSDPIETLYGLGYRLKSVPEEREQGSEQGHGDTETRGRGDTETRGQGDTGNIFDRLSALPFGATSRHKSLPSGFGSDAPNVANAALTDSTGNGATPLKSGNPPTGVAPQVENATSKTPTSSPQSGSVQGAGSPHLPISAFSSSYLLNANRYDAEAEAVAAIQQMWQDSQERLQGQLAKLEEAIAHLSTNSLTPDGRQFAQTIAHRLIGSLGAFGMPQAAELARQIERTLKTPTAAVQSEEAVQLKSLLGQLRQVIQQLPTFATTAPTPVLKSSDRVVLLIDDDTDLIERMQANASNWSIHLETVTDLTLARQRLQYLTPDAIILDLTFPNTTESGLTLLAQLKHQFSTIPVLVLTGLGDLTKRVEVTRLGANAFLQKPATPTEVFQAVSQLLHRIDTINARLLIVDDDPALLSILEAQLQPWGFQVTTLADSSQFWQYLEATTPDLLLLDVAMPGFSGIELCQVVKSDPRWSRLPVLLLSAHADADTLYRALAAGADDYILKPIVEADLIQRILNFNSW

SEQ ID NO: 51156 - protein, 400 aa, Neurospora crassa
MAARNCTKALRPLARQLATPAVQRRTFVAAASAVRASVAVKAVAAPARQQVRGVKTMDFAGHKEEVHERADWPAEKLLDYFKNDTLALIGYGSQGHGQGLNLRDNGLNVIVGVRKNGKSWEDAIQDGWVPGKNLFDVDEAISRGTIVMNLLSDAAQSETWPHIKPQITKGKTLYFSHGFSPVFKDLTKVEVPTDVDVILVAPKGSGRTVRSLFREGRGINSSFAVYQDVTGKAKEKAVALGVAVGSGYLYETTFEKEVYSDLYGERGCLMGGIHGMFLAQYEVLRERGHSPSEAFNETVEEATQSLYPLIGAHGMDWMFDACSTTARRGAIDWTPKFKDALKPVFNNLYDSVKNGDERKRSLEYNSQPDYRERYEAELDEIRNLEIWRAGKRSLRPENQK

SEQ ID NO: 51157 - protein, 234 aa, Mannheimia succiniciproducens MBEL55E
MKKIEQLFANNHSWALRMKEENSSYFKELADHQTPHYLWIGCSDSRVPAEKLTNLEPGELFVHRNVANQVIHTDLNCLSVVQYAIDVLNIEHIIICGHTNCGGIKAAMANQDLGLINNWLLHIRDIWYKHSHLLGNLSPEKRADMLTKINVAEQVYNLGRASIVQDAWKRGKKLSLHGWVYDVSDGFLIDQGVLATSRESLEISYRNSIARLKTLDEEDIFRKGNKENNDEIIG

SEQ ID NO: 51158 - protein, 464 aa, Silicibacter pomeroyi DSS-3
MAAQSYDVIVIGAGPGGYVAAIRAAQLGLKACVVEREHLGGICLNWGCIPTKALLRSSEVFHLMERAKEFGLKADNIGYDLDAVVKRSRGVAKQLSGGIGHLMKKNKIDVVMGEATIPAKGKVSVKTDKGTQELTAKNIILATGARARELPGLEADGDLVWTYKHALQPVRMPKKLLVIGSGAIGIEFASFYNTLGADTTVVEVMDRVLPVEDAEISAFAKKSFVKQGMKIMEKSMVKQLDRAKGKVTAHIETGGKVEKLEFDTVISAVGIVGNVENLGLEALGVKIDRTHVVTDAYCRTGVEGLYAIGDIAGAPWLAHKASHEGVMVAELIAGKHAHPVKPESIAGCTYCHPQVASVGYTEAKAKELGYDIKVGRFPFIGNGKAIALGEVEGMIKTIFDAKTGELLGAHMVGAEVTEMIQGYVVGRQLETTEEDLMHTVFPHPTLSEMMHESVLDAYGRVIHM

SEQ ID NO: 51159 - protein, 260 aa, Hyoscyamus niger
MAGRWNLEGCTALVTGGSRGIGYGIVEELANLGASVYTCSRNQKELDECLTQWRSKGFNVEASVCDLSSRSEREEFMKTVSNHFHGKLNILVNNAGIVIYKEAKDYTMEDYSHIMSINFEAAYHLSVLAHPFLKASERGNVVFISSISGASALPYEAVYGATKGAMDQLTRCLAFEWAKDNIRVNGVGPGVIATSMVEMTIQDPEQKENLDKLIDRCALRRMGEPKELAAVVAFLCFPAASYVTGQIIYVDGGFMANGGF

SEQ ID NO: 51160 - protein, 241 aa, Neurospora crassa
VDHQCLDLNDLKPVLQRSLNTNSIALNTGNTIPITLDGFVWRVNGTAININWNKPVLEYVLTGNTNYSQSDNIVQVEGVNQWKYWLIENDPDGAFSLPHPIHLHGHDFLILGRSPDVTAISQTRYVFDPAVDMARLNGNNPTRRDTAMLPAKGWLLIAFRTDNPGSWLMHCHIAWHVSGGLSNQFLERAQDLRNSISPADKKAFNDNCDAWRAYFPDNAPFPKDDSGLRSGVKAREVKMKW

SEQ ID NO: 51161 - protein, 197 aa, Medicago sativa
MSGSRFIKCVTVGDGAVGKTCLLISYTSNTFPTDYVPTVFDNFSANVVVDGSTINLGLWDTAGQEDYNRLRPLSYRGADVFLLAFSLISKASYENIAKKWIPELRHYAPGVPIILVGTKLDLRDDSQFFQDHPGAAPITTAQGEELRKLIGAPVYIECSSKTQKNVKAVFDSAIKVVLQPPKQKKTKRKGQKACSIM

SEQ ID NO: 51162 - protein, 496 aa, Glycine max
MEGNLINILYLLIFLISLKLLFFRKRLKNPAPSPPSLPIIGNLHQLKKQPLHRALYDLSQKYGPNNILSLRFGSQPVLVVSSASAAEECFTKNDIIFANRFRSSLTKYIGFNHTIITASSYGDHWRNLRRISSLEILSNHRLNSFLGVRKDETMKLLRKLAKGSDKDFRRVELRPMFSELTFNIIIKMVCGKRYYGEEYDGTNAEEAKRFREIMNEISQFGLGSNLADFVPLFRLFSSRKKLRKVGEKLDAFFQGLIDEHRNKKESSNTMIGHLLSSQESQPEYYTDQTIKGLIMALYVAGTETSAVALEWAMSNLLNSPEVLEKARVELDTQVGQDRLIEEADVTKLQYLQNIISETLRLHPPLSMLLPHLSSEDCTVGSYDVPRNTMLMVNAWAIHRDPKIWADPTSFKPERFENGPVDAHKLISFGLGRRACPGAGMAQRTLGLTLGSLIQCFEWKRIGEEKVDMTEGGGTIVPKAIPLDAQCKARPIISKIF

SEQ ID NO: 51163 - protein, 451 aa, Exiguobacterium sp. 255-15
MNIICWIRSDFRLEDNHMLARAVEYLEKDEQANVEFVFWVNPDYIGEYDARQQYFFQALEHFAKNCKTHDMPIRFIEGQEKDFLEATEMADVLLFNAEYVEPFKSRDDGIMKKRGDKKTERLLDRHLLHPHAVKKNDGSYYKVFTPYKNAFLKKDVDKPYPVKLNLLKERYHKRRQNNAFMLDYFKRAASDTDFAVGEETARKRLRSFLKNNLSAYEEQRDLPAVDGTSLMSRYLRTGEIGIRTIFDAVQQEQDSKGKQTYLTELIWREFYYTILMHYPESKRLPVNEQYTKIEWETDEKGFKAWAEGKTGYPIVDAAMRQLNTTGWMHNRLRMIVASFLTKDLLVDWQKGERYFQQKLVDYEAASNIGGWQWAASVGTDAVPYFRVFNPTTQSKKFDKDGTFIRTYLPELKDLPKTSIHEPTEQQRKDYDYPMPIVEHDMARKRAIARFK

SEQ ID NO: 51164 - protein, 379 aa, Euglena gracilis
MNPFRLLLQRAGGDLMRLKLQSTFKVHTPEGMPEFTGPNDFTEVTVDQIKRFHTDMVRIRRMETKASQMYTQKKIRGFCHLYIGQEAVCVGMESSLTFKDAIITAYRDHAWHLTRGGTITEVIAEMQGKAAGCSKGKGGSMHMYKAANNFYGGNGIVGAQCPVGAGIAFGLAYEDPKAPKGVCLSLYGDGAANQGQLFEAMNMASLWKLPVIFVCENNQFAMGTSVKRGSAQQVFYKRSDYIPGLWVDGMDVLACREGMRYAKEWCMAGNGPVCMEMQTYRYMGHSMSDPGTSYRTRDEVQKVKEERDCISKLSSRLIAEGISTEAELKTVEKETNKEVDKEIAAVEALPPTPFEEIGRDIFDVPITVRACDHTIVYGQ

SEQ ID NO: 51165 - protein, 249 aa, Kineococcus radiotolerans SRS30216
MDERDEQDKQTSAMDAATQAGWSHRHRDVSGGWLRPTVFGAVDGLVTNASLIAGVGGGGVSAHTVVLTGLAGLVAGAFSMGTGEYVSVTNQNELVHAEVAVERRMHERFPEAEQAELEQTFRGYGADEETAARMAAAVSADPEQALRVHTREELGVDSQDLPSPVLAGAASLAAFSVGAVLPLLPYLLGHASLVAAMVITALALVGGGTAVGRLTGRPLAFSGLRQLALGAVAVAVTYGIGRLVGGTVA

SEQ ID NO: 51166 - protein, 189 aa, Triticum aestivum
HSITSLYKKAGWYRSGIPGISSTHASADPVGCYKEIYRVLKPGQCFAVYEWCITDHYDPNNATHKRIKDEIELGNGLPDIRSTRQCLQAVKDAGFEVIWDKDLAEDSPLPWYLPLDPSRFSLSSFRLTTVGRIITRNMVKVLEYVGLAPEGSQRVSSFLEKAAEGLVEGGKKEIFTPMYFFVVRKPLSE

SEQ ID NO: 51167 - protein, 366 aa, Eurotium herbariorum
MAEFVRATIFGTTFEITSRYTELQPVGMGAFGLVCAARDQLTGAPVAVKKIMKPFSTPVLSKRTYRELKLLKHLGHENIICLSDIFISPLEDIYSVTELLGTDLHRLLTSRPLEKQFIQYFLYQILRGLKYVHSAGVVHRDLKPSNILINENCDLKICGFGLARVQDPQMTGYVSTRYYRAPEIMLTWQKYDVEVDIWSAGCIFAEMLDGKPLFPGKDHVNQFSIITELLGTPPDDVIETICSENTLRFVKSLPKRERQPLTSRFKNADPEAVDLLERMLVFDPKKRIRAGEALAHEYLAPYHDPTDEPEAQEKFDWSFNDADLPVDTWRIMMYSEILDFHNIDQSEDAGQVLVEGVGDGQQAFAA

SEQ ID NO: 51168 - protein, 583 aa, Kluyveromyces lactis
MTITKLLRDPQTEPKWWKEAIVYRFQDSNHDGWVRYQRYVSKLSTLKELGANAIWICPFYDSPQEDMGYDISDYEKVWPRYGTNEDIFNLIDRAHGLGIKSIVDLVINHCSSEHAWFKEARSSLDNPKRDWFIWKAPKGFDSNGKPIPPNTWRSFFGGSAWRYDEHTGQFYLRLFAKGQPDFNWENEVTRNAIYESAVGFWLDHGVDGFRIDTAGLYSKQPGFPDVPIINPGLDFQHPDPAILNGPRIHEFHKEMNKFMRERVKDGRELLTVGEIPCGTHDVCKAYTSAKDQEITQLFEFEHVSVGRKPGNVGVVNFKLSEFKDGIAARFQFIDKTDSWSTVYIENHDQPRSVTRFGDDSPEYREISAKLLALLETSLTGTLYVYQGQELGMINFRDWPIEKYEDVEVKGMYKWMVDQFGADSDQVKDYVNGLQLISRDHARTPFPWTSEAPYAGFTDGKEPWFPLTETFQEGINAEDELKDPKSVFNFWKTAIEVRKTHKDVLNYGYDFTFVDHANKKLFAFTKKFGEKVLYVVLNFSKEEIEFSFLEGYNSYDYIFGNYPEAEIDLDLTSLQPWEGRFYYA

SEQ ID NO: 51169 - protein, 237 aa, Oryza sativa (japonica cultivar-group)
MLAVFSGAVVEVPAELVAAGSRTPSPKTRASELVGRFLAAAEPAVSLQLGDLGHLAYSHANQSLLRPRSFASKDDIFCLFEGVLDNLGRLSQQYGLSKGANEVLLVIEAYKTLRDRAPYPASFMLSQLTGSYAFVLFDKSTSSLLVASDPEGKVPLFWGITADGSVAFSNDIDLLKGSCGKSLAPFPQGCFYSNALGGLKCYENPKNKVTAVPANEEEICGATFKVESATAILTALH

SEQ ID NO: 51170 - protein, 395 aa, Arabidopsis thaliana
MTTMGDLPGDLVEEILSRVPLTSLRAIRSTCQKWNSLSKSQICGRKATAAENKFLGFMMKDSRVCSMKFDLQGIRNDDGELVEPSIKQVSKLDQIEVSQVFHCDGLVLCIIKDNTGLLVWNPYLGQTRWIHPRNNYQIEDRYALGYDNNRNHKILRIFDLYPSSNRVFGYEVYDFSSNSWKVLDVIPEWDIQSHFRGASLKGNAYFPAQKKETVGGIKTINIEDVLLCFDFTRERFGPPLPLPFHSYNADFFVSLACVREEQLAVLYQRWGAFETIEICVTNKIDPNTVSWSKFLITSTGFPVDTFSGSFFIDEEKKVAVVFDLDRYKPTETCRYQIVYIIGQDEYFKSVNMGVAPNIAKNSYQAYCVPLVCSSSYVPSLVQLQINKPGKRKESN

SEQ ID NO: 51171 - protein, 597 aa, Solibacter usitatus Ellin6076
MQRVTPRTLYQVLEETARTYGDAPALRQPLPNGAYTVYSWNDYKRAAEEIAAGLRMLGVGKGDVVALNSETRLEFYLADLGILTNGSIAAAMYPSYPAADLVRTIQTTQARAVFVEDPKTLKTLRNAAGALEAVHWILFTGEAAGALTLDQVRARGRESLAVDPGLLARIRAAVSPSDMAILYLTSGATGEPKMALVSHQSVVSNIDMGPAVLPMGPGDSTVAFLPSAHIAQRVVIEFLPLRCGMPVTFFESLLKLPNDIRKVRPTILLAPPRMWERIYSTICTELRKKPAAVRKAFYGALGMALAAARYRREGKPIPWRLRAPLSVADRIFFRKVRGRFGGRIRVAASGAAPLSKDLAEFYEAIGMPLVEGYGLTEGGVTSLNPLDRPKPGSIGKPLAGVEFRFSEDNEILIKGPSLFEGYLNDPVTTAEVLREGWLHTGDLGHQDEEGYIFITGRKKELIVSSTGKKIYPSRVESLFKMEPLISQVLLIGDRLPFLTALFTINTAAAESLKGMEEWKGRPAQEIMQAPPVLAEIQKVVARVNKQLAPFEQVRKHRILGRDFTIENGELTATMKVRRTRAMENFREQIDELYAGRE

SEQ ID NO: 51172 - protein, 296 aa, Zea mays subsp. mexicana
RPEIAHAHQPVMSPSHHGWDGNGAAAVPTPMPKRLDGKVAIVTGGARGIGEAIVRLFAKHGARVVTADIDDAAGEALASALGPQVSFVRCDVSVEDDVRRAVDWALSRHGGRLDVYCNNAGVLGRQTRAARSILSFDAAEFDRVLRVNALGAALGMKHAARAMAPRRAGSIVSVASVAAVLGGLGPHAYTASKHAIVGLTKNAACELGAHGVRVNCVSPFGVATPMLINAWRQGHDDATADADRDLDLDVTVPSDQEVEKMEEVVRGLATLKGPTLRPRDIAEAVLFLASDEARYI

SEQ ID NO: 51173 - protein, 2551 aa, Alternaria solani
MDKPVAIIGIAFRGPGDARDPEAFYRMLVEGRNARTEIPKDRYNVDAFYHPDSERLGSIQQRHAHFLQQDFKVFDAPFFSITPKEAKAMDPTHRILLEATYEGFENAGLSLEKVSGTQTSCYIGTFTADFPNLQARDNEGPSIYHATGMSASLASNRLSWFYNLRGPSLTVDTACSSSLTAFHLACQSIRTGEAEMSVVGGANLMFGPDMSILLGAAKILSPEGKSKMWDANANGFARGEGFGVTILKPLDAALRDGDNIRAVVLATAANEDGHTPGISLPNSEAQQELIRRAYQIAGVDPAETAYVEAHGTGTQAGDPLEARAILKTIGSVEGRKSDLYVGSVKTNIGHLEGAAGVAGIIKAALTVERGMIPPNLWFEKLNPEIDLPDNVKIASKLTPWPHSGPRRASINSFGFGGANAHAILEDAASFLSRHGLSGRHTTAPLLPSLSSVRVSHPSDSPSSSASTVAEEATSGESSDNISDVSSEVLRDVYPIPKLFVLSSHDQEGVKRSAERLQEYLASKTSTTPSFLNDLAYTLSAKRTTLPWKSYAVSSSVSGLREKISSLPPVVRSSTSAIPRIAFVFTGQGAQWHAMGRGLSVYKTFAESLQRSEVMLKSFGCPWSLAEELSRSKAEYKLRETDYSQPACTAIQVALVDLLSGFDVRPVAVLGHSSGEIAAAYAAGFIDQEAAIKIAWLRGQVNKTVSKNGGMLAVSASADSIQSHLDGLKSGKAVVGCFNSTKACTVTGDTSAIDELQTMLKDAQVACTRLPMDVAYHSFHMEAAREKYEQALEGIAHGSTSTIPMFSSVTGTLVDPAQMKPSYWVDNLVSPVNFVAATRSLLSHPQESKSRKAFANLFVELGPHSALRSYLLDIISSENRAADTTYTTLLRRNFDGAATALEAMGHLWAHGCKVDLSKVNDVSSDSTNMLIDLPPYAWNHKPYWDESHLSRQHRLRKSPRTDLVGYRLLGTPEHTWRNFLRCNENPWIREHKVQGDILYPGAGMLVMAIEAAHQLAQETSADEIYGFELRDVSIDTALRVPDTEKGIEVMTQLHNRRTGTRAAPSSTLYEFTVSSWSEEMSSWSTHARGLVSITFKTFSPSMEREVALGNERYMSSLAEVRRVCQTPARSFLYDTVETIGMQYGPTFRNMTELYAGPNSSYGVINVPDTKAIMPKGFEFPHVVHPATLDSVLHLIFPSISGEDQALNEAVVPRSFDRIFVSASIPKNAGAELRGCSSAKKLSYTTWNSNITMSDATMTEPVVIMEGVVLASVGATEDASKQLETRASCFAQNWHVDADLLTPSQIKEIIYKRTLKSKDDDSVLDLLEFVCLVYIYRILDWFQTEEGKPHVPRDGFWKSYVEWMHDTVKQFPALPADVETEMEKARQRIVKSESGDITVQMVDRIGQNLSRIFTREVEALQCMTEGDLLYSFYRGAFGTSFNTNVAEYVGLIADKQPGLRILEIGAGTGGTTYHVLERLRNPDGTSKAAQYYFTDISPGFLAKAADRFNQDASIMQFGTLNIENAPTEQGFSPELFDLIVCANVLHATKSIQETLTHCKLLLKPGGRLVLSEVTIKRIFSGFIMGPLPGWWLGEADGRMGGPLLDADEWNVALKKAGFSGVDVDVRGDRETSKEPVSLLISTKPKTTAPSLPSCLVITTGTEASNMLADTIQRVFTSAGHDISIAQWNSVTKTQVEGKYCLCLAEWEDAILVNLTDDDWDRLREVVLSSEGALWITGGGALDTPFPMKSLMVGLGRAIRNEDAGVRLACLDLDPPTTIDFEEASRTTLKVAYAHIRGDGTEGEFAAHGDKVYVPRVERTLQVDGSLRKYEAKGDPEMVPFKSCGRPLKLTIKTPGLLDTFQWEEDETYHTPLPEDWIEIEVKAVGLNFKDVLVALGNLAENKLGVDASGIVTRVGSAVTNVQVGDRVMTASCDTFATYVRFPAKGAIGVPTGMSFEEAASMPLIFLTAYYALVTAGGIVAGEKVLIHAAAGGVGQAAIMIAQAKGAEIFATVGADTKKQLLIEQYGIPEDHIFSSRDTSFVKGVLRATDGQGVDLVLNSLAGEALRLSWTDCLAKFGRFLEIGKADLFANTGLDMKPLLDNKSYIGVNLLDFENNPTPRAVALWHDTAKMIHDGAIKPIAPLQVFTMAEVEKAFRHMQAGKHMGKVVVRVDDADVVRAVPRIPRVSIHPDATYMIAGLGGITREIARWLAEKGARYLVFLSRSAASGTDNQAFALQLRNTYDVTPLAYDCDVGNKAALQAVLDDLKAKGLPPINGCATGAMVLQDCLFDKMTADHVRTTVGPKVHGTWNLHELLPRDMDFFVMLSSLAGVMGHRGQGNYGCGNNFQDEFASFRRGQGLPAMTIDIGYLLSVGFVAEHDEYVDHVKAMGLKVMHTSDLHGLVATAIEGPSQHPGQVMCGLPFNEHDDAWYWMADARFAALRNVAAGSAANAGQAISLREELTRCGTVNEEAVQLITAAIAQRLASLMMIPEADIDAGRPLSAYGVDSLVAVEVRNWVAREMAVEVSVFDVMQNVPMTQLAQNLAEKSKLLLGQA

SEQ ID NO: 51174 - protein, 374 aa, Arabidopsis thaliana
MTMMSDLSEDLVEEILCRVSITSLGAVRSTCKGWYVLSKTRVLCKAETKHQFLGFMKKNYKLCSMRFDLHGNFNEEGGEEFMNPSIKKSGNLLDQLDICKVFQCDGLLLCVTKEENTRLVVWNPYSGQIRWIKCNNSYHRYEGYAIGYNNNRKHKILRFSDMSFSTYKIYDFISNSWRVLDIAPNWHINPDQRGASLKGNTYFFAREKREDEEDEDILWQPVEYLLCFDFTTENFGQLHPLPFEQYIDDAGALSSFGEEKLAALFQSFASSVVEIWVTSMIEANAVSWIPFLKVDMKPHCSFRFRLPFDGGSFFIDEEKKVAVVIHVDVVAESEMNRYEDVAYIIGENGSYVPSLAQINQSVEFENEREEEEAN

SEQ ID NO: 51175 - protein, 183 aa, Datisca glomerata
GADMAIYYPYSDEEKRLTALHDTIEKMLYDPEQNDEHIGILSDKSKPLIFTMARLDRVKNLTGFVELYGKSSRLRELANIVVIGGYFDVKKSKDREEIAEIEKMHDLIKKYDLGSQFRWISAQLDRALSGELYRYIADTRGAFVQPAVYEAFGLTVVEAMTSGLPTFATCHGGPAEIIEHGIS

SEQ ID NO: 51176 - protein, 333 aa, Craterostigma plantagineum
MNQQQVKVSKNNKQVNNCEDDDDSSDLRRGPWTVDEDFTLINYIAHHGEGRWNSLARFAGLKRTGKSCRLRWLNYLRPDVRRGNITLEEQLLILELHSRWGNRWSKIAQHLPGRTDNEIKNYWRTRVQKHAKQLKCDVNSKQFKDTMRYLWMPRLVERIQASATTDDGAPPAVASSPSSAMNTACYSAAMAAGDHRRQFMLMPQYYATTTTTHNNSMIAQENSSTVASSESFGSLSSELTAEANYANYHRVINGADHQQIDSSTTSYDWQNCAVGNNGNSDQLGMGFADDRRSNEQWMMMTDDVVDNGGSSDQDNNLWNVDDVWFLQQFSSCF

SEQ ID NO: 51177 - protein, 298 aa, Zea mays subsp. mexicana
RPEIAHAHQPVMSPSHHGWDGNGAAAVPTPMPKRLDGKVAIVTGGARGIGEAIVRLFAKHGARVVIADIDDAAGEALASALGPQVSFVRCDVSVEDDVRRAVDWALSRHGGRLDVYCNNAGVLGRQTRAARSILSFDAAEFDRVLRVNALGAALGMKHAARAMAPRRAGSIVSVASVAAVLGGLGPHAYTASKHAIVGLTKNAACELGAHGVRVNCVSPFGVATPMLINAWRQGHDDATANADRDLDLDLDVTVPSDQEVEKMEEVVRGLATLKGPTLRPRDIAEAVLFLASDEARYI

SEQ ID NO: 51178 - protein, 276 aa, Zea mays subsp. mexicana
RPEIAHAHQPVMSPSHHGWDGNGAAAVPTPMPKRLDGKVAIVTGGARGIGEAIVRLFAKHGARVVIADIDDAAGEALASALGPQVSFVRCDVSVEDDVRRAVDWALSRHGGRLDVYCNNAGVLGRQTRAARSILSFDAAEFDRVLRVNALGAALGMKHAARAMAPRRAGSIVSVASVAAVLGGLGPHAYTASKHAIVGLTKNAACELGAHGVRVNCVATPMLINAWRQGHDDATADADRDLDLDLDVTVPSDQEVEKMEEVVRGLATLKGPTLRYI

SEQ ID NO: 51179 - protein, 463 aa, Lupinus luteus
MKMGNSSFVAIALLMSVVVLCNGGKTSSYVRKLIQNPVDMPLDSDAFAIPPGYNAPQQVHITQGDHVGQAMIISWVTVDEPGSNEVIYWSNSSLQNFTAEGEVFTYTYYNYTSGFIHHTNITNLEFNTTYFYVVGIGNTTRQFWFITPPEVGINVPYTFGIIGDLGQTFDSNTTLTHYQNSKGNTLLYVGDLSYADNYPNHDNVRWDTWGRFIERSAAYQPWIWTAGNHEIDFDPQIGETQPFKPFSNRYHTPYVASQSTEPYYYSIKRGPAHIIVLASYSAYGTSSLQYKWLTSELPKVDRTKTSWLIVLMHAPWYNSYYSHYMEGEPMRVVFESLFVKYKGDVVFAGHVHAYERPERVSNDKYNITNGICTPVKDISAPVYITNGDGGNQEGLSINMTQPQPSYSAYREASFGHGTLEIKNRTHAHYSWNRNQDGYAVEADKLWLFNRYWNPRDDSTIHIP

SEQ ID NO: 51180 - protein, 123 aa, Triticum aestivum
LVPLYRTFIDPQRIAAFTRAPPKIFEGANVGCKFELFGGNVAGEYTELLEPTKIVQKWRLDTWPKGHFSRLEIVFDQNDIDNVTVMRVTWSGVPIGHEEVTKKNWKEYYVRSIKQTFGFGAIL

SEQ ID NO: 51181 - protein, 298 aa, Zea mays subsp. mexicana
RPEIAHAHQPVMSPSHHGWDGNGAAAVPTPMPKRLDGKVAIVTGGARGIGEAIVRLFAKHGARVVIADIDDAAGEALASALGPQVSFVRCDVSVEDDVRRAVDWALSRHGGRLDVYCNNAGVLGRQTRAARSILSFDAAEFDRVLRVNALGAALGMKHAARAMAPRRAGSIVSVASVAAVLGGLGPHAYTASKHTIVGLTKNAACELGAHGVRVNCVSPFGVATPMLINAWRQGHDDATADADRDRDLDLDVTVPSDQEVEKMEEVVRGLATLKGPTLRPRDIAEAVLFLASDEARYI

SEQ ID NO: 51182 - protein, 310 aa, Pseudomonas fluorescens Pf-5
MSAERILVTGGAGFIGSHLVDALLAKGYAVRVLDDLSTGKVGNLPMGDAGLELLVGDAADAALLADAVQGCDAVVHLAAVASVQASVEDPVATHQSNFIATLRLCEAMTAAGIRRVVFASSAAVYGNNGEGTPIAEDTPKSPLTPYAADKLASEYYLDFYRRQHGLEPVILRFFNIFGPRQDPSSPYSGVISIFSERAKAGRPITLFGDGGQTRDFVYVADLVKILVQGLECPAPAADATNVGLGGVTTLNDLIGALQQISGKPLQVSHGATRSGDIRHSKADNRRLRERFDLGTPSSLAEGLERLYRSL

SEQ ID NO: 51183 - protein, 451 aa, Daucus carota
MRECISVHIGQAGIQIGNACWELYCLEHGIQPNGQMPSDKTVGGGDDAFNTFFSETGAGKHVPRAIFVDLEPTVIDEVRTGTYRQLFHPEQLISGKEDAANNFARGHYTIGKEIVDLCLDRIRKLADNCTGLQGFLVFNAVGGGTGSGLGSLLLERLSVDYGKKSKLGFTVYPSPQISTSVVEPYNSVLSTHSLLEHTDVSVLLDNEAIYDICKRSLDIERPTYTNLNRLVSQVISSLTASLRFDGALNVDVTEFQTNLVPYPRIHFMLSSYAPVISAEKAYHEQLSVAEITNSAFEPSSMMAKCDPRHGKYMACCLMYRGDVVPKDVNAAVGTIKTKRTIQFVDWCPTGFKCGINYQAPTVVPGGDLAKVQRAVCMISNSTSVAEVFSRIDTKFDLMYSKRAFVHWYVGEGMEEGEFSEAREDLAALEKDYEEVGAESAEGDDEDEGEDY

SEQ ID NO: 51184 - protein, 155 aa, Triticum aestivum
  misc_feature (138)..(138): Xaa can be any naturally occurring amino acid
  unsure (1)..(155): unsure at all Xaa locations
MTTGGNGEEQQGRRLFGVSLTDRPVWQQFLICSSGFFFGYLVNGICEEYVYNRLQFSYGWYFTFVQGFVYLGLIRLQGFTTKQMVNPWRTYVRLSAVLMGSNGLTKGSLAFLNYPAQIMFKSTQGLPVMIMGAFIPGXRRKYPFHEYVSAVMLVI

SEQ ID NO: 51185 - protein, 368 aa, Pseudomonas syringae pv. phaseolicola 1448A
MTGAQRWVVKIGSALLTADGKGLDRNAMGVWVEQMAALHEAGVELVLVSSGAVAAGMSRLGWTARPSAMHELQAAAAIGQMGLVQAWESSFAEHGRHTAQILLTHDDLSDRKRYLNARSTLRTLVELGVVPVINENDTVVTDEIRFGDNDTLAALVANLVEADLLVILTDRDGMFDADPRNNPEAQLIYEARADDPALDAVAGGTGGALGRGGMQTKLRAARLAARSGAHTVIVGGRIERVLARLKGGERLGTLLSPERGMLAARKQWLAGHLQTRGTLVLDDGAVAALAKDQKSLLPVGVKLVQGSFRRGEMVVCVASDGREIARGLSNYSAIEAQKIIGHSSESIVRELGYMAEPELIHRDNLILV

SEQ ID NO: 51186 - protein, 211 aa, Triticum aestivum
  misc_feature (9)..(9): Xaa can be any naturally occurring amino acid
  unsure (1)..(211): unsure at all Xaa locations
MSWWWAGAXGAVKKSQDERAASSFQSVALVVGSTGIVGTSLVDILPRHDTPGGPWKVYAVSRRPLPPWSPPPSPAVTHLHLDLADPVARSGRALTPLTDITHVFYAAWSSHPTEAQNREANSAMLRNMLSVVVPGCPALAHVCLQTGRKHYIGPYEAIGKIPIPDPPYTEDMPRLDYPNFYYDQEDVLFEEVSRRDGAVSWSVHRPSAVFG

SEQ ID NO: 51187 - protein, 253 aa, Chlamydia trachomatis
MSKLTQVFKQTKPCIGYLTAGDGGTSYTIEAAKALIQGGVDILELGFPFSDPVADNPEIQVSHDRALAENLTSETLLEIVEGIRAFNQEVPLILYSYYNPLLQRDLDYLRRLKDAGINGVCVIDLPAPLSHGEKSPFFEDLLAVGLDPILLISAGTTPERMSLIQEYARGFLYYIPYEATRDSEVGIKEEFRKVREHFDLPIVDRRDICDKKEAAHVLNYSDGFIVKTAFVHQTTMDSSVETLTALAQTVIPG

SEQ ID NO: 51188 - protein, 386 aa, Bruguiera gymnorhiza
MAKPVSIEVWNPRGRYRVVSTKPMPGTRWINLLVQQDCRLEICTEKKTILSVEDIIALMGDKCDGVIGQLTEDWGETLFAALSKAGGKAFSNMAVGYNNVDVNAANKYGVAVGNTPGVLTETTAELAASLSLAAARRIVEADEFMRAGLYDGWLPNLFVGNLLKGQTVGVIGAGRIGSAYARMMVEGFKMNLIYYDLYQATRLEKFVTAYGQFLKANGEQPVTWKRAATMDEVLREADVISLHPVLDKTTYHLINKESLASMKKEAVLVNCSRGPVIDEVALVEHLRRNPMFRVGLDVFEDEPYMKPGLADMKNAIVVPHIASASKWTREGMATLAALNVLGKIKGYPVWGDPNRVEPFLNENAPPPAACPSIVNSKALGLPVSKL

SEQ ID NO: 51189 - protein, 1307 aa, Magnaporthe grisea 70-15
MADAATLAAVAAIVENIATNSGAPGKNASFRSSTYVQLPGPESDEKKQLERELAALVIRVQQLETRANAAPATIFPDTPNETAYSLFGDDSSSPTSSSSGREPKRLKSASSTTRNGFTTDGRPSKLNAITDEELEGLREHVDGQSRLLDSQRAELDGVNAQLLEQKQLQERALAIIEQERVATLERELWKHQKANEAFQKALREIGSIVTAAARGDLSKRVKINPIEMDPEITTFKRTMNAMMDQLGVFSSEVSRVAREVGTEGILGGQAQIEGVDGTWKELTDNVNVMAQNLTDQVREIASVTTAVAHGDLTQKIESAAKGEILQLQQTINTMVDQLRTFASEVTRVARDVGTEGMLGGQADVEGVKGMWNELTVNVNAMANNLTTQVRDIINVTTAVAKGDLTQKVQAECRGEIFELKNTINSMVDQLQQFAREVTKIAREVGTEGRLGGQATVHDVQGTWRDLTENVNGMAMNLTTQVREIANVTSAVAAGDLSKKIRVEVKGEILDLKNTINTMVDRLGTFAFEVSKVARAVGTDGTLGGQAQVENVEGKWKDLTENVNTMASNLTSQVRGISTVTQAIANGDMSRKIDVEAKGEILILKETINNMVDRLSIFCNEVQRVAKDVGVDGIMGGQADVAGLKGRWKEITTDVNTMANNLTAQVRAFGDITNAATDGDFTKLVEVEASGEMDELKRKINQMVYNLRDSIQRNTQAREAAELANKTKSEFLANMSHEIRTPMNGIIGMTQLTLDTDLTQYQREMLNIVNNLAMSLLTIIDDILDLSKIEAKRMVIEEIPYTLRGTVFNALKTLAVKANDKFLDLTYRVDSSVPDHVIGDSFRLRQIILNLVGNAIKFTEHGEVSLTIQKGNDVTCLPNEYMIEFVVSDTGIGIPTDKLGLIFDTFQQADGSMTRKFGGTGLGLSISKRLVNLMGGDVWVKSQYGKGSSFYFTCRVRLADVDISLIRKQLKPYKGHQVLFIDKGKTGHGPEVGQMLGQLGLVPIVLESEQNHTLTRVRGKECPYDVIVVDSIDTARRLRGIDDFKYLPIVLLAPTVHVSLKSCLDLGITSYMTMPCKLIDLGNGMVPALENRATPSLSDNTKSFEILLAEDNTVNQRLAVKILEKYNHVVTVVSNGAEALEAVKDNKYDVILMDVQMPVMGGFEATAKIREYERSLGTQRTPIIALTAHAMMGDREKCIEAQMDEYLSKPLQQNHLIQTILKCATLGGALLEQNRERELELARHAEHKGGLSTDPARASSVMRPPLHHRPVTTAESLSGGAESPSLMANDGEDPIQRARSSLSEPGCL

SEQ ID NO: 51190 - protein, 511 aa, Bruguiera gymnorhiza
MAMASFARRKAYLLTRNLSNNSCSDALSCSFCLSSFSRGFASAGSDDNDVVVIGGGPGGYVAAIKAAQLGLKTTCIEKRGALGGTCLNVGCIPSKALLHSSHMFHEAKHSFASHGVKFSSVEIDLPAMMAQKEKAVSTLTKGIEGLFKKNKVTYVKGYGKFVSPSEVSVDTLEGGNIVVKGKNIIIATGSDVKSLPGITIDEKKIVSSTGALALSEIPRKLVVIGAGYIGLEMGSVWGRLGSEVTVVEFAPDIVPSMDGEIRKQFQRTLEKQKMKFILKTKVVGVDTSGDGVKLTLEPASGGNQTTLEADVVLASAGRIPFTAGLGLDKIGVETDKVGRVLVNDRFQTNASGVYAIGDVIPGPMLAHKAEEDGVACVEFIAGTHGHVDYDKVPGVVYTHPEVASVGKTEEQVKSLGIDYRVGKFPFLANSRAKAIDDAEGIVKILAEKETDKVLGVHIMSPNAGELIHEAVLALTYDASSEDIARVCHAHPTMSEALKEAAMATYDKPIHI

SEQ ID NO: 51191 - protein, 280 aa, Oceanobacillus iheyensis HTE831
MVNQIPNVTLHDGLTIPKVGFGTYRLNGNDGVQAINNAIDHGYRLIDTAYNYENEGTVGEAVRRSSTPREQLLITSKLPGRYHHYDKAVTTIQESLYRANLDYYDLYLIHWPNPIQDIYVEAWQALIEAKRRGYIRSIGVCNFLPEHLERLKQETGELPTINQIELHPFFNQEDQRKWHQEHQIATESWSPLARTNDVLDHPVLQKLASNHNRTVSQIILRWHYQLDAIAIPKSATPSRQLENISIFDFELSDEEMSIINQLSKVDGRMKDQDPAVYEEF

SEQ ID NO: 51192 - protein, 450 aa, Escherichia coli O157:H7 EDL933
  misc_feature (393)..(393): Xaa can be any naturally occurring amino acid
  unsure (1)..(450): unsure at all Xaa locations
MTKHYDYIAIGGGSGGIASINRAAMYGQKCALIEAKELGGTCVNVGCVPKKVMWHAAQIREAIHMYGPDYGFDTTINKFNWETLIASRTAYIDRIHTSYENVLGKNNVDVIKGFARFVDAKTLEVNGETITADHILIATGGRPSHPDIPGVEYGIDSDGFFALPALPERVAVVGAGYIAVELAGVINGLGAKTHLFVRKHAPLRSFDPMISETLVEVMNAEGPQLHTNAIPKAVVKNADGSLTLELEDGRSETVDCLIWAIGREPANDNINLEAAGVKTNEKGYIVVDKYQNTNVEGIYAVGDNTGAVELTPVAVAAGRRLSERLFNNKPDEHLDYSNIPTVVFSHPPIGTVGLTEPQAREQYGDDQVKVYKSSFTAMYTAVTTHRQPCRMKXVCVGPEEKIVGIHGIGFGMDEMLQGFAVALKMGATKKDFDNTVAIHPTAAEEFVTMR

SEQ ID NO: 51193 - protein, 474 aa, Euglena gracilis
MFRQSFIQLAKHDLIVIGGGPGGYVAAIKAAQLGLNVACVEKRGTLGGTCLNVGCIPSKALLNASHHYHDAKHKFAGYGIDIPSVSMDIPKMQGTKAKSVTRLTGGIELLFKKNKVTYYKGFASLEGDKKVKVVGETTEVHEADKILIATGSEPIELPFLKFDEKVVCSSTGALDFQEVPAHLVVIGAGVIGLELGSVWSRLGSKVTVVEFMDRICPFMDADVGKEFHRILKKQGLQIKTSTKVVAGKVEGGQVILELESVDGAKKETLQANAVLVSVGRRPFTDGLGLDKVGVELNAKKFIVVDDHFKTNKDGIYAVGDVIHRGPMLAHKAEDEGICVAEMFAGKAGHINYDTIPNVIYTHPEVAWVGKTEEDLKKEGRKLKTSKFPFQANSRAVTNVDTEGFVKVVTDADTDRLLSMSIINSNAGEAIAEAVLAMEYSGSAEDIGRTCHAHPTLSEAIKEACMAAYDKPIHV

SEQ ID NO: 51194 - protein, 330 aa, Trichotomospora caesia
KTKPTQHSVAALRNIGIQPDAIVLRADRDVPVAIKRKISLMRDVDEAAVVAAIDAKSIYDIPKVLHTEGLDAYVVRKLDLPFRDVDWSTWEDLLDRVHNPDHEVTIALVGKYIDLPDAYLSVTEALRAGGFANRARVKVKWVTSDDCKTAAGAAGQLSDVDAICIPGGFGDRGVSGKVGAIQYARENRIPLLGLCLGLQCIVIEAARNLAGIPDANSTEFDAVTAHPVISTMEEQLAYVEGAGDLGGTMRLGLYPAKLAEGSIVREVYDDQPYVEERHRHRYEVNNAYRAELEKKAGIVFSGTSPDNKLVEYVEYPREVHPYLVATQAHP

SEQ ID NO: 51195 - protein, 328 aa, Cellulomonas fimi
KTKPTQHSVAALRSIGIQPDAIVLRADRDVPDGTKRKIALFCDVDVEGVVTAKDAPSIYDIPRVLHSEGLDAYVVQRLGLPFRDVDWSGWDELLHRVHQPAHQVEVALVGKYIDLPDAYLSVTEALRAGGFHHDAKVVIRWVRSDDCQTPEGARLALEGVDAVLVPGGFGVRGIEGKLGALRWARENLVPTLGICLGLQCMVIEYSRNVLGLDGASSSEFDDDPAHPVIATMAEQLAIVGGAGDLGGTMRLGAYEARLKAGSLVAEAYGSETVSERHRHRYEVNNAYRDKLEEAGFVISGVSPDTSLVEFVELPRETHPYFVATQAHP

SEQ ID NO: 51196 - protein, 545 aa, Borrelia garinii PBi
MAKDIYFNEDARKSLLSGVEKLSNAVKVTLGPKGRNVLIDKKFGSPTVTKDGVSVAREIELENPFENMGAQLLKEVAIKTNDVAGDGTTTATVLAYAIAREGLKNVSSGINPIGIKKGIDHAVNLAAEKIRQSAKKITTKEEIAQVASISANNDSYIGEKIAEAMDKVGKDGVITVEESKTFDTTISYVEGMQFDRGYLSPYFSTNKENMSVSFDDAFILIYEKKISSIKELLPVLEKVLGTNKPLLIIAEDIEGDALAALVLNSVRGALKVCAIKSPGFGDRRKAMLEDIAVLTGGVLISEELGITLETVEIEQLGQAKTIKVDKDNTTIINTGNKEQIKERSELIKKQIEDSTSEYDKEKLQERLAKLVGGVAVINVGAVTEVELKEKKHRVEDALSATRAAVEEGVVPGGGSTLIEVAMYLDTIDTSKLSYEEKQGFEIVKRSLEEPMRQIISNAGFEGSIYIHQIKTEKKGLGFDASSFKWVNMIESGIIDPAKVTRSALQNAASIAGLLLTTECAITDIKEEKNTSGGGGYPMDPGMGMM

SEQ ID NO: 51197 - protein, 388 aa, Arabidopsis thaliana
MMMPHLSEDLVEEILSRVPAISLKRLRYTCKQWNALFNDQRFSKKHRDKAPKTYLGLTLKDFRIYSMSSNLHGLLHNNNIDLLMEFKGKLSSLNDLNDFEISQIYPCDGLILCSTKRNTRLVVWNPCTGQTRWIKRRNRRMCDTFAFGYDNSKSSCLNNYKILRVCEKIKGQQFEYEIFEFSSNSWRVLDVNPNCIIEGRSVSVKGNSYWFATITKTHYFIRRFDFSSETFQKLPLPFHIFDYNDSRALSAFREEQLSVLHQSFDTEKMDIWVTNKIDETTDWSWSKFFTVRLINRLDYPISMMMKSPLSFFIDEKKNIILCYDKHRENTYKSLVLIVGKDKVYREFYFPESYELGRTYLCNYVPSLVQIKQSGLISTRKRKRKDFSS

SEQ ID NO: 51198 - protein, 539 aa, Streptococcus thermophilus CNRZ1066
MAKDIKFSSDARAAMVRGVDTLADTVKVTLGPKGRNVVLEKAFGSPLITNDGVTIAKEIELEDHFENMGAKLVSEVASKTNDIAGDGTTTATVLTQAIVREGLKNVTAGANPIGIRRGIEAAVAAAVEELKVIAQPVANKEAIAQVAAVSSRSEKVGEYISEAMERVGNDGVITIEESRGMETELEVVEGMQFDRGYLSQYMVTDNEKMVADLENPYILVTDKKISNIQDILPLLEEVLKTSRPLLIIADDVAGEALPTLVLNKIRGTFNVVAVKAPGFGDRRKAMLEDIAVLTGATVITEDLGLELKDATMESLGQASKVTVDKDSTVIVEGAGSAEAIANRVNLIKSQLETTTSEFDREKLQERLAKLSGGVAVIKVGAATETALKEMKLRIEDALNATRAAVEEGIVAGGGTALVNVIAKVAELDLEGDDATGRNIVLRALEEPVRQIAYNAGYEGSVIIDKLKNSPVGTGFNAANGEWVDMVESGIIDPVKVTRSALQNAASVASLILTTEAVVADKPEQKAPAAPATDPGMMGY

SEQ ID NO: 51199 - protein, 585 aa, Mesembryanthemum crystallinum
MGGSNALNEMTNGSDGITGGVADVYGEEFATQDQLVTPWSFSVACGHSLLRDPQHNKGLAFTEKERDAHFLRGLLPPVVLSQELQEKKFLTTLRQYQVPLQKYMAMMDLQERNEKLFYKLLVDHVEELLPLVYTPTVGEGCQKYGSIFRRPQGLFISLKDKGRILELLRNWPEKKIQVIVVTDGERILGLGDLGCQGMGIPVGKLSLYSALGGVCPSACLPITLDVGTNNQKLLDDEFYIGLKQKRATGEEYAEFVQEFMSAVKQNYGEKILVQFEDFANHNAFELLEKYRTTHLVFNDDIQGTASVVLAGLIASLKLLGGTLADHKFLFLGAGEAGTGIAELIALEMSKKTKAPVEQMRKKIWLVDSKGLVVSSRKETLQQFKLPWAHEHEPITTLIDAVQAIKPTVLIGTSGKGKQFTKEVVEAMANINAKPLILALSNPTSQSECTAEEAYTWSQGHAIFASGSPFDPVEYEGRTFVPGQANNAYIFPGFGLGLIMCGAIRVHDDMLLAASEALASQVTGEHFIKGLIYPPFKDIRKISAHIAAGVAAKAYELGLASRLPQPADLVKFAESCMYNPTYRSFR

SEQ ID NO: 51200 - protein, 405 aa, Methanosarcina barkeri str. fusaro
MKAIILAAGEGLRCRPLTLTRSKVMLPIANRPILEHVIGSLEKNGITDIILIVGYKKERIMDYFEDGLNFGVKIKYVEQKAQLGTAHAIEQAKKWIEPEDSEFLVLNGDNLVEPKTIADLLNNYEGDASLLTVQMEETAGYGVVLKEKKRVTRILEKRPGDLSRIVNTGIYIFTPQVFETIEKTPISENGEYAITDTLQLMIDEGKIVTSVSTKSKWIDAVHSWDLLKANAIVLNSARNLKLEGEVEEGVFLSGKVAVGKNTRIRSGTYIVGPVVIGENCDIGPNVVILPSTTIGDNVSIRSFTEIQNSIIMNDCRIYSHGRISNSIIGSNNTIGSGFFVEEKEGLSIIMNGTIHRAPRLGTIFGDDNRIGNSVLVKAGVTIAVDCQVESGNTIYRDLSRHSVVL

SEQ ID NO: 51201 - protein, 518 aa, Triticum aestivum
  misc_feature (70)..(70): Xaa can be any naturally occurring amino acid
  misc_feature (74)..(74): Xaa can be any naturally occurring amino acid
  misc_feature (84)..(84): Xaa can be any naturally occurring amino acid
  unsure (1)..(518): unsure at all Xaa locations
PAAMPSLDFDTAVFNKEKVSLAGHEEYIVRGGRNLFPLLPEAFKGVKQIGVIGWGSQGPAQAQNLAAALXGSQXSDIVVNIGLXKGSKSFEEARGAGFTEENGTLGDIWETVSGSDLVLLLISDSAQADNYEKIFSHMKPNSILGLSHGFLLGHLQSHGLDFPKNISVVAVCPKGMGPSVRRLYVQGKEVNGAGINASFAVHQDVDGRATDVALGWSVALGSPFTFATTLEQEYKSDIFGERGILLGAVHGIVEALFRRYTEQGMDEELAYKSTVEGITGIISKTISKKGMLEVYNSLSEEGKKEFNKAYSASFYPCIDILYECYEDVASGSEIRSVVLAGRRFYDKEGLPAFPMGKIDQTRMWKVGEKVRSTRPDGDLGPLHPFTAGVYVALMMAQIEVLRKKGHSYSEIINESVIESVDSLNPFMHARGVAFMVDNCSTTARLGSRKWAPRFDYILTQQAFVTVDKDEPINQDLISNFMSDPVHGAIEVCAELRPTVDISVTADADFVRPELRQSS

SEQ ID NO: 51202 - protein, 250 aa, Vitis labrusca x Vitis vinifera
MESLGVRKGAWIQEEDVLLRKCIEKYGEGKWHLVPLRAGLNRCRKSCRLRWLNYLKPDIKRGEFALDEVDLMIRLHNLLGNRWSLIAGRLPGRTANDVKNYWHGHHLKKKVQFQEEGRDKPQTHSKTKAIKPHPHKFSKALPKFELKTTAVDTFDTQVSTSSKPSSTSPQPNDDIIWWESLLAEHAQMDQETDFSASGEMLIASLRAEETATQKKGPMDGMIEQIQGGEGDFPFDVGFWDTPNTQVNHLI

SEQ ID NO: 51203 - protein, 588 aa, Legionella pneumophila subsp. pneumophila str. Philadelphia 1
MKNNLPIKSRLLYKRLLSYVKPFWPVLLLGVLANILYSGIDAGFTYMTKLFLDKSFITIDLNFVKQIPLIVLIGITLRGLVSSLGSYCMTWVARSVVKVLRQTVFSHIIHLPADYYDEATSGQLLSKILYDVEQVAQVSADALTDFIQNICLVIGLLTVMMVICWQLSLMFLLTIPFVGIIVNYTNKRVRRISHKVQKTMGEVTEIASEAIEGYRVVRIFGGERYEITKFNKATEYSRKNDMKVAISKAINVSGVQLVIAIGIATIIMAAIHLSTVITISAGSFLAIIAAMLQLIKPMKTLTTLNATIQRGLAGAESVFNLLDLPLERNNGLILKEKIRGEIEFKHVYHAYRQGQNILHDVNFVIEAGTSVALVGHSGSGKTTIASLLPRFYELSQGMITLDGMPIQQLSLESLRKQMSLVSQNVTLFNDTLANNIAYGRFDASREQIITAAKLAYADEFIKQLPDGYDTRVGENGVLLSGGQRQRIAIARAILKDAPILILDEATSALDSESEHYIQAALEQVMKGRTTLIIAHRLSTIKHAHKIIVLQHGRIVEQGSHQELLDMDGHYAQLYKVQQFGRINEEVVA

SEQ ID NO: 51204 - protein, 286 aa, Medicago truncatula
AVATAALIYVKEIPLSPEKVTGNGVTDEDGNVTKSSNPCFGELSGAFRERKRPMWILLLVTCLNWIAWFPFLLFDTDWMEKEEYGGTVGEGHAYDKGVRAGALGLMLNSVVLGAASLGVDVLARGVGGVKRLWGIVNFLLAICLAMTVLVTKLAQHSRVYADASHTDPLPPSGGITAGALALFSVLGIPLAITYSIPFALASIFSSSSGAGQGLSLGVLNLAIVIPQMIVSVLSGPWDALFGGGNLPAFVVGAVAALASGILSVVLLPSPPPDLAKSVTATGGGFH

SEQ ID NO: 51205 - protein, 125 aa, Glycine max
LVQLGLCVNLFFTFPIMMNPVNEVMERRFFGSRYCLWLRWMMVLIISLVALLVPNFADFLSLVGSSVCVVLSFVLPAMFHCLVFKEELGWRCVLWDGAIVVFGFVIAVTGTFTSVMEILWPTPTA

SEQ ID NO: 51206 - protein, 322 aa, Schizosaccharomyces pombe
MAGFMRQLFVCMIGIYGSFLSWAVMQEKIITRPYDGERFSSPALLSLAQSFMTVLCGLLWNWFHGVSARGLLEPKFLGYFSSIAISASLSSYFGYASMFHLSYPTVILGKSCKLLPVIALHVFVYKRKFPPHKYLIVTMITAGVSIFSYFQNTSSKGKHAEHDSPIGLLLLFFNLLMDGITNTTQDKVFGKYKLSSVTMMIAVNLGIACLNGLYLISPFCNQQPLSFINRHPSILKDMLLFACTGSVGQLFIFFTLEKFGSITLVTITLTRKIFTMLLSVFHFHHTVSSIQWLGILLVFLGISLEAGLKILNNNSTAKKKAS

SEQ ID NO: 51207 - protein, 247 aa, Vitis labrusca x Vitis vinifera
MESLGVRKGAWIQEEDVLLRKCIEKYGEGKWHLVPLRAGLNRCRKSCRLRWLNYLKPDIKRGEFALDEVDLMIRLHNLLGNRWSLIAGRLPGRTANDVKNYWHGHHLKKKVQFQEEGRNKPLTHSKTKAIKPHPHKFSKALPRFELKTTAVDTFDTQVSTSSKPSSTSPQPNDDIIWWESLLAELDQETDFSASGEMLIASLRAEETATQKKGPMDGMIEQIQGGEGDFPFDVGFWDTPNTQVNHLI

SEQ ID NO: 51208 - protein, 300 aa, Zea mays subsp. mexicana
RPEIAHAHQPVMSPSHHGWDGNGATAVPTPMPKRLDGKVAIVTGGARGIGEAIVRLFAKHGARVVIADIDDAAGEALASALGPQVSFVRCDVSVEDDVRRAVDWALSRHGGRLDVYCNNAGVLGRQTRAARSILSFDAAEFDRVLRVNALGAALGMKHAARAMAPRRAGSIVSVASVAAVLGGLGPHAYTASKHAIVGLTKNAACELGAHGVRVNCVSPFGVATPMLINAWRQGHDDATADADRDRDLDLDLDVTVPSDQEVEKMEEVVRGLATLKGPTLRPRDIAEAVLFLASDEARYI

SEQ ID NO: 51209 - protein, 222 aa, Oryza sativa
MRRLWRWYQQCLATHPVRTQVVSSGILWGLGDIGAQAVTHYSAPGRPRHHQHHAKNPPEDKDKEFKIDWKRVGITSSFGFAFVGPVGHYWYEYLDRFILRRYQPKTFKFVASKVAADGLLFGPVDLLLFFSYVGLASGRSVEQVKDDVKRDFIPALVLGGTIWPAVQIANFRFIPVRYQLLYVNLFCLLDSCFLSWIDQQGDAPWKQWFTSFQKIEGQKGKV

SEQ ID NO: 51210 - protein, 307 aa, Vitis labrusca x Vitis vinifera
MESLGVRKGAWIQEEDVLLRKCIEKYGEGKWHLVPLRAGLNRCRKSCRLRWLNYLKPDIKRGEFALDEVDLMIRLHNLLGNRWSLIAGRLPGRTANDVKNYWHGHHLKKKVQFQEEGRDKPQTHSKTKAIKPHPHKFSKALPKFELKTTAVDTFDTQVSTSSKPSSTSPQPNDDIIWWESLLAEHAQMDQETDFSASGEMLIASLRAEETATQKKGPMDGMIEQIQGGEGDIIWWESLLAEHAQMDQETDFSASGEMLIASLRTEETATQKKGPMDGMIEQIQGGEGDFPFDVGFWDTPNTQVNHLI

SEQ ID NO: 51211 - protein, 402 aa, Oryza sativa (japonica cultivar-group)
MDSLRLRPSLLAARAPGAASLPPLRRDHFLPPLCSIHRNGKRPVSLSSQRTQGPSFDQCQKFFGWKSSHHRIPHRPTSSSADASGQPLQSSAEAHDSSSIWKPISSSLDAFYALSIVSVSLLAVENLSDVSPLFLTGLLEICFVTLVQAVVAALFMNIYIVGLNQLFDIEIDKVNKPTLPLASGEYSPATGVALVSAFAAMSFGLGWAVGSQPLFLALFISFILGTAYSINLPFLRWKRSAVVAALCILAVRAVIVQLAFFLHIQATFVFRRPAVFTRPLIFATAFMTFFSVVIALFKDIPDIEGDRIFGIKSFSVRLGQKKVFWICVGLLEMAYCVAILMGATSACLWSKYATVVGHAILAAILWNRSRSIDLTSKTAITSFYMFIWKLFYAEYLLIPLVR

SEQ ID NO: 51212 - protein, 464 aa, Silicibacter pomeroyi DSS-3
MATITNHMPTAELQALDAAHHLHPFSANNALGEEGTRVITRARGVWLNDSEGEEILDAMAGLWCVNIGYGRDELAEVAARQMRELPYYNTFFKTTHVPAIALAQKLAELAPGDLNHVFFAGGGSEANDTNIRMVRTYWQNKGQPEKTVIISRKNAYHGSTVASSALGGMAGMHAQSGLIPDVHHINQPNWWAEGGDMDPEEFGLARARELEEAILELGENRVAAFIAEPVQGAGGVIVAPDSYWPEIQRICDKYDILLIADEVICGFGRTGNWFGTQTMGIRPHIMTIAKGLSSGYAPIGGSIVCDEVAHVIGKDEFNHGYTYSGHPVAAAVALENLRILEEENILDHVRNVAAPYLKEKWEALTDHPLVGEAKIVGMMASIALTPNKASRAKFASEPGTIGYICRERCFANNLIMRHVGDRMIISPPLVITPAEIDEMFVRIRKSLDEAQAEIEKQGLMKSAA

SEQ ID NO: 51213 - protein, 296 aa, Zea mays subsp. parviglumis
RPEIAHAHQPVMSPSHHGWDGNGAAAVPTPMPKRLDGKVAIVTGGARGIGEAIVRLFAKHGARVVIADIDDAAGEALASALGPQVSFVRCDVSVEDDVRRAVDWALSRHGGRLDVYCNNAGVLGRQTRAARSILSFDASEFDRVLRVNALGAALGMKHAARAMAPRRAGSIVSVASVAAVLGGLGPHAYTASKHAIVGLTKNAACELGAHGVRVNCVSPFGVATPMLINAWRQGHDDATADADRDLDLDVTVPSDQEVEKMEEVVRGLATLKGPTLRPRDIAEAVLFLASDEARYI

SEQ ID NO: 51214 - protein, 545 aa, Zea mays
MYTLPVRATTSSIVASLATPAPSSSSGSGRPRLRLIRNAPVFAAPATVCKRDGGQLRSQTREIERERKGGHPPAGGHKRGGERGQRRGGEEEEDEQLPLPSEKKGGASEGEAVHRYPHLVTPSEPEALQPPPPPSKASSKGMDPTVERLKSGFQKFKTEVYDKKPELFEPLKSGQSPRYMVFACSDSRVCPSVTLGLQPGEAFTVRNIASMVPPYDKIKYAGTGSAIEYAVCALKVQVIVVIGHSCCGGIRALLSLKDGAPDNFTFVEDWVRIGSPAKNKVKKEHASVPFDDQCSILEKEAVNVSLQNLKSYPFVKEGLAGGTLKLVGAHSHFVKGQFVTWEPPQDAIERLTSGFQQFKVNVYDKKPELFGPLKSGQAPKYMVFACSDSRVCPSVTLGLQPGEAFTVRNIAAMVPGYDKTKYTGIGSAIEYAVCALKVEVLVVIGHSCCGGIRALLSLQDGAAYTFHFVEDWVKIGFIAKMKVKKEHASVPFDDQCSILEKEAVNVSLENLKTYPFVKEGLANGTLKLIGAHYDFVSGEFLTWKK

SEQ ID NO: 51215 - protein, 425 aa, Zea mays
MDRLPESTRSMRKYASEAGGLRAARQGPHGRSLTARTAHSMSTTALRTKSKSAASLLRRVPFAPLRPVLANLQEVFLGTKLAVLFPAVPLAIAAQCAHFGQVWVFSLSLLGLIPLAERVSFLTEQIAIYTGPTVGGLLNATCGNATELIIALFALMEGQIEVVKCSLLGSVLSNLLLVLGTSLFCGGVVNLGSDQPYDRTQADVSTGLLILGVLCQSLPLMLRYAVGAGEHSVAAATTVLDLSRACSVVMLLAYVAYLFFQLKTHAQLFEPQEVDDGCEAEEDEQAVIGFASGLFWLAFNTVLIAILSEYVVGTIEPTSKSWGLSVSFISIILLPIVGNAAEHAGAIIFALKNKLVPLSVIVAWIAGIQMDLDFKLIETGSLFVSVIVTAFTLQDGSSHYLKGILLLLCYIVIGACFFVTRQPAS

SEQ ID NO: 51216 - protein, 335 aa, Escherichia coli CFT073
MNILVTGGAGYIGSHTAIELLNAGHEIIVLDNFSNASYKCIEKIKEITRRDFITITGDAGCRKTLSAIFEKHAIDIVIHFAGFKSVSESKSEPLKYYQNNVGVTITLLQVMEEYRIKKFIFSSSATVYGEPEIIPIPETAKIGGTTNPYGTSKYFVEKILEDVSSTGKLDIICLRYFNPVGAHSSGKIGEAPSGIPNNLVPYLLDVASGKRDKLFIYGNDYPTNDGTGVRDFIHVVDLAKGHLAAMNYLSINSGYNIFNLGTGKGYSVLELITTFEKLTNIKVNKSFIERRAGDVASCWADADKANSLLDWQAEQTLEQMLLDSWRWKKNYPDGF

SEQ ID NO: 51217 - protein, 242 aa, Schizosaccharomyces pombe
MSISCLSASAAKALDAELMSAGAFSIDQLMELAGLSVSQAVYREYPPSQYSQVLICCGPGNNGGDGLVAARHLWQYGYKPTVYYPKPSSPELYKRLCKQLDDLDIPVVKSHDSNHFSQLLRDSKLVVDSIFGFSFKGPVRDPFGSILAAIVESKIKVLSVDAPSSWEIDEGPQKEGPLKDFDPDTLISLTAPKPCSKFYKGKHYLGGRFVSKVITKKFNLSLPPYPGIDQVVDITNKPLSMV

SEQ ID NO: 51218 - protein, 169 aa, Brassica napus
MDTVIGSIDACNPTTGDICRPPNGAVSTVQNSPPAHSTTISPCDATLGRYLARRLVEIGVTDVFSVPGDFNLTLLDHLIAEPSLKLIGCCNELNAGYAADGYARSRGVGACVVTFTVGGLSVLNAIAGAYSENLPLICIVGGPNSNDYGTSRILHHTIGLPDFTQELRC

SEQ ID NO: 51219 - protein, 327 aa, Gordonia rubripertinctus
KTKPTQHSVAALRNVGIQPDALILRCDRDVPEGLKKKIALMCDVELDGVISTPDAPSIYDIPKVLHNEHLDAYVVRKLGLPFRDVDWTVWGELLHRVHEPRETVRVALVGKYVDLPDAYLSVTEAIRAGGFAWKARTEIKWVPSDDCDTPAGAQAALGDVDAILIPGGFGIRGIEGKVGAISYARRRGIPLLGLCLGLQCVVIEAARSVGLDEASSTEFDPDTPHPVISTMADQADAVAGEADLGGTMRLGAYDAVLKAGSVVAESYGSREVSERHRHRFEVNNAYRDKIADSGLVFSGTSPDGHLVEFVEYPKTVHPFFVATQAHP

SEQ ID NO: 51220 - protein, 328 aa, Microtetraspora niveoalba
KTKPTQHSVAALRSIGIQPDAIVLRSDRPVTNTIKRKISLMCDVDEDAVVSAVDAASIYDIPKVLHAEGLDAYVVRRLGLPFRDVDWTQWDQLLRRVHRPAKEVTIALVGKYIDLPDAYLSVTEALRAGGFANDARVNIRWVKSDDCESPEGAARELDGVDGVLIPGGFGVRGIEGKVGAIRHARENAVPLLGLCLGMQCMVIEAARNLAGIEDAGSTEFDPETPAAVISTMADQEDVVSGERDMGGTMRLGLHPAKLTEGSLARQLYGKAKVEERHRHRYEVNNSFRERLEKVGMVFSGLSPDGRLVEYAELATDQHPFFIGTQAHP

SEQ ID NO: 51221 - protein, 448 aa, Candida albicans
MREVISINVGQAGCQIGNACWELYSQEHGIRPDGYLQEGLDRPKGGEEGFSTFFSETGSGKYVPRALYVDLEPNVIDEVRTGVYKDLFHPEQLIAGKEDAANNYARGHYTVGREILDDILDRVRRMSDQCDGLQGFLFTHSLGGGTGSGLGSLLLEQLSLDYGKKSKLEFAVYPAPQVSTSVVEPYNTVLTTHTTLEHADCTFMVDNEAIYDMCRRNLDIARPNFSSLNNLIAQVVSSVTASLRFDGSLNVDLNEFQTNLVPYPRIHFPLVSYAPVFSKSRATHEANSVSEITQSCFEPGNQMVKCDPRTGKYMATCLLYRGDVVTRDVQNAVAQVKSKKTVQLVDWCPTGFKIGICYQPPTAIKGSELASASRAVCMLSNTTAIAEAWRRIDRKFDLMYSKRAFVHWYVGEGMEEGEFTEAREDLAALERDYIEVGTDSFPEEEEEY

SEQ ID NO: 51222 - protein, 327 aa, Rhodococcus rhodochrous
KTKPTQHSVAALRNIGIQPDALVLRCDRDVPASLKAKISLMCDVDVAGCISCPDAPSIYDIPKVLHSEGLDAYVVRQLGLPFRDVDWTVWGNLLERVHNPRETVEVALVGKYIDLPDAYLSVTEALRAGGFAHRAKVKIRWVASDECETEAGAEKHLGDVDAVLIPGGFGIRGIEGKLGAIRFARTRRIPLLGLCLGLQCVVIEAARSVGIEDASSTEFDPDTTAPVISTMADQELAVAGEADLGGTMRLGAYPAALKKGSVVARAYGSEQVSERHRHRYEVNNAYRDKIAKSGLVFSGTSPDGRLVEFVEYPAEQHPFFVATQAHP

SEQ ID NO: 51223 - protein, 330 aa, Silicibacter pomeroyi DSS-3
MTATRKTSRKSNTSAEELKHYYREMLLIRRFEEKAGQLYGMGLIGGFCHLYIGQEAVVVGLEAAAEEGDKRITSYRDHGHMLACGMDPGGVMAELTGREGGLSKGKGGSMHMFSKEKHFYGGHGIVGAQVPLGAGLAFADKYQDNGRVTFTYFGDGAANQGQVYETFNMAALWKLPVIFVIENNQYAMGTAQKRSTSSPDIYTRGEAFGIPGETVDGMNVLSVKEAGEKAVAHCRAGKGPYILEVKTYRYRGHSMSDPAKYRTREEVQKVREQSDPIEMVREMLLSGKHATEDDLKAIDKEIKEIVNQAAEFSKESPEPSVDELWTDIYA

SEQ ID NO: 51224 - protein, 328 aa, Kocuria rhizophila
KTKPTQHSVATLRGLGIQPDALVLRCDRDVPDAMLRKIGSACDVDLDAVISCADAPSIYDIPNTLHTQGLDTYILDYLGLDYQDADLRQWARLLTAVHEPEHQVTVALVGKYIDLPDAYLSVSEALRAGGFANNAKVNLKWVASDLCDTPEGAQRELGDVDAVCVPGGFGIRGLEGKLGALTWARTHKVPTLGLCLGLQCMVIEYARNEVGLPNASSTEFDPETDTPVIATMEEQKQFVEGAGDLGGTMRLGLYPASLAEGSVVAETYGATEVSERHRHRYEVNNAYRDALAEAGLRISGTSPEGTLVEFVELPREEHPYYVATQAHP

SEQ ID NO: 51225 - protein, 248 aa, Borrelia garinii PBi
MYKLVLVRHGESEWNKENLFTGWTDVKLSDKGINEALEAGLLLKQEGYSFDIAFSSLLSRANDTLNIILRELGQSYISVKKTWRLNERHYGALQGLNKSETAAKYGEGKVLIWRRSYDVPPMSLDESEDRHPIKDPRYKYIPKRELPSTECLKDTVTRVIPYWTDEIAKEVLGGKKVIVAAHGNSLRALVKYLDNLSEEDVLKLNIPTGIPLVYELDKDLNPIKHYYLGDESKIKSAMESVASQGKLK

SEQ ID NO: 51226 - protein, 328 aa, Propionibacterium acnes
KTKPTQHSVAALREVGIQPDAIVCRSERPIGKGIKSKIALMCDVEGPAVVSCPDAPSIYLIPKVLHREGLDAYVVQKLSLFFRDVDWTTWDDLLDRVRKPRSEVTVALVGKYIDLPDAYLSVTEALRAGGFANKAKVNVVWVASDSCATAEGAAQQLRDADAICVPGGFGIRGVEGKVGAIRYAREHKVPFLGLCLGMQCAVIEVARDLAGIKDAASSEFDSQTPDPVIATMAEQVEAVAGKADLGGTMRLGAYPAKLAKDSLVAELYGTTTVTERHRHRYEVNNAYRDRLEQAGLRISGTSPDGGLVEFVELDRQTHPYFVATQAHP

SEQ ID NO: 51227 - protein, 407 aa, Silicibacter pomeroyi DSS-3
MSQSSECARPHRRGFDFCASAVFLCTQRAQSVGGCAMRGCPLLLWRPETCQNPAPFCRGFAAQGFTAVSVVSRAVTKTTFFDENLIERVLWQFTMKEQRANAIPATCRYARYSANPTPTPRPVKINESDRTMNFEEKIATHYGHGNLTAAIRSGLQAQGITPEQASVEDLGPVDEFHIGGRAATVHFFDQIDLSETSKALDIGCGLGGAARYAAHSFGSQIEGIDLTPEYVETGGALCQWVGLSDKVNLSVASALSMPFESGDFDIAYMMHVGMNIEDKRALFKEVARVLKPGGTFAIYDIMRSNDEDLVYPVPWASSAETCCLAGPATYRAALEEGGFVVRQENDRRDFAIDFFEKMKKANAGQKSPPPLGLHVLMQQTTAEKIPNMIANLQAGRIKPVEIYAVKQ

SEQ ID NO: 51228 - protein, 253 aa, Vitis labrusca x Vitis vinifera
MVRAPCCDKVGLKKGPWTTQEDQNLTAYVLQHGHGNWRALPKQAGLLRCGKSCRLRWINYLRPDIKRGNFSREEEDTIIELHEKLGNKWSAIAASLPGRTDNEIKNVWHTHLKKRLKKKLATPDSKGHFTPAASACDSDSFNSSGKMSPQPSSSEFSSFTDSSTRTMETHSTGVKNEQMEEYSPESFPEIDESFWSDALSSDNSSMASDFPAVADELQLQTPELACGQISNMMDDGMEFWYDVFIRAGGLQEL

SEQ ID NO: 51229 - protein, 298 aa, Zea mays subsp. parviglumis
RPEIAHAHQPVMSPSHHGWDGNGAAAVPTPMPKRLDGKVAIVTGGARGIGEAIVRLFAKHGARVVIADIDDAAGEALASALGPQVSFVRCDVSVEDDVRRAVDWALSRHGGRLDVYCNNAGVLGRQTRAARSILSFDAAEFDRVLRVNALGAALGMKHAARAMALRRAGSIVSVASVAAVLGGLGPHAYTASKHAIVGLTKNAACELGAHGVRVNCVSPFGVATPMLINAWRQGHDDATADADRDLDLDLDVTVPSDQEVEKMEEVVRGLATLKGPTLRPRDIAEAVLFLASDEARYI

SEQ ID NO: 51230 - protein, 202 aa, Triticum aestivum
MVDLQAAALVISVVAAEVQAIYLHSTAMAPTVMASSTTSVAPFQGLKSTAGLPVSRRSNGASLGSVSNGGRIRCMQVWPIEGIKKFETLSYLPPLSTEALLKQVDYLIRSKWVPCLEFSKVGFIFREHNASPGYYDGRYWTMWKLPMFGCTDATQVINEVEEVKKEYPDAYVRIIGFDNMRQVQCVSFIAFKPPGCEESGKA

SEQ ID NO: 51231 - protein, 338 aa, Legionella pneumophila subsp. pneumophila str. Philadelphia 1
MLRQYSKNINKLLIYKELIMGILIDGIWHDENNINTDKEGRFVRAESGFRQHITANGESGFKAEPDRYHLYLSYACPWACRTLIMRKLKGLEKIISVSFSDPVMGKNGWSYGESGNETADHINHIHYLKELYLVARKDYTGRVTVPVLWDKKKKTIVNNESSEIMRMLNSEFNAFSSTDHDYYPKQWRQKIDEINQLVYENINNGVYKCGFAKSQKAYEEAFDALFNTLNQIENLLATQRYLLGEQLTEADWRLFTTLIRFDAVYHGHFKCNLQRIADYPHLSNYLRELYHFPGIKETVNFNHIKQHYYRSHLSINPTGIVPKGPKLNLDEPHNRYEF

SEQ ID NO: 51232 - protein, 294 aa, Saccharomyces cerevisiae
MKTLVHVASVEKGRSYEDFQKVYNAIALKLREDDEYDNYIGYGPVLVRLAWHISGTWDKHDNTGGSYGGTYRFKKEFNDPSNAGLQNGFKFLEPIHKEFPWISSGDLFSLGGVTAVQEMQGPKIPWRCGRVDTPEDTTPDNGRLPDADKDAGYVRTFFQRLNMNDREVVALMGAHALGKTHLKNSGYEGPGGAANNVFTNEFYLNLLNEDWKLEKNDANNEQWDSKSGYMMLPTDYSLIQDPKYLSIVKEYANDQDKFFKDFSKAFEKLLENGITFPKDAPSPFIFKTLEEQGL

SEQ ID NO: 51233 - protein, 253 aa, Vitis labrusca x Vitis vinifera
MVRAPCCDKVGLKKGPWTTQEDQILTAYVLQHGHGNWRALPKQAGLLRCGKSCRLRWINYLRPDIKRGNFSREEEDTIIELHEKLGNKWSAIAASLPGRTDNEIKNVWHTHLKKRLTKKLATPDSKGHFTAAASTCDSDSFNSSGKMSPQPSSSEFSSFTDSSTRTMETHSTGVKNEQMEEYSPESFPEIDESFWSDALSSDNSSMASDFPAVADELQLQTPELAYGQISNMMDDGMEFWYDVFIRAGGLQEL

SEQ ID NO: 51234 - protein, 298 aa, Zea mays subsp. parviglumis
RPEIAHAPQPVMSPSHHGWDGNGAAAVPTPMPKRLDGKVAIVTGGARGIGEAIVRLFAKHGARVVIADIDDAAGEALASALGPQVSFVRCDVSVEDDVRRAVDWALSRHGGRLDVYCNNAGVLGRQTRAARSILSFDASEFDRVLRVNALGAALGMKHAARAMAPRRAGSIVSVASVAAVLGGLGPHAYTASKHAIVGLTKNAACELGAHGVRVNCVSPFGVATPMLINAWRQGHDDATADADRDRDLDLDVTVPSDQEVEKMEEVVRGLATLKGPTLRPRDIAEAVLFLASDEARYI

SEQ ID NO: 51235 - protein, 1059 aa, Pseudomonas fluorescens Pf-5
MIAGGAAGALGNYYRVQVEDVYRASIQMQTREQAQDLEQWKSNGFAIGALSILGRHNPSLKRIVLEPEPSADLMERATIPLKTLSLVVEANHAFVLNREGVVVAAHDQHGQTPLGLNVAFRPYFKVALDGGSSVYGAISATTGTRMFYMAAPIFESRTRQDKVIGVLVARFDADRLDASLSKPYSDDLKMILSPSGVVLAASSPAFILKSDRAWPWNRFTGEIRRQFSDYRFANGVPERLPFDAHQSVIQLDGRRYSLSRVDFDWNDPSGPWTLITLGDLDTLLPGEQVLLIEGLSALVFLLLLWGGLRRLADARRHKRDVAQIEQSEQRLDMALQSGALGLWDWNLSLGTVINNDVWLQILGYSKQQMEQAFGHGLERWTALVHPDDYEPVMARLKAHLNDEVGEYRAEYRMRNKEGQWLWVLDIGKIMQRDASGAPARVTGVLQDISERKAVEAQIQQSRQDAERATQAKSEFLDCMSHEIRTPLNAIIGMAHLALDLPLEPVQRDYIEKIDRAAKHLVGTINGVLDLSKIEAGKLSMEQVGFDLRELVDDVLLLVRQRAEEKALRLQLDIPASLPHRYVGDPLRLAQVLTNLVDNAIKFTEAGHVCIGVYLVRQWDHQALLCFSVTDTGVGISDEQQARLFNVFVQADRSISRRYGGSGLGLTISKKIVQLMQGDIRVKSQPGQGATFKFSVQLSLPPLPLEENCATPAAPATGATAGQGAINDPVRWLAGTRVLVVEDNRLNQEVLQGLLQRVGGQVVLAANGAQALRLLLEEGRFDAVLMDCQMPVMDGFATTRKIRGYPHLRWLPIIAVTASSQADVQGRAVAAGMSDLLSKPLEVAAFYRTLVRWIKATDMPVAQVPAPPGTRVLNSTYAGIDTACGLAVVNQDLALHRKLLADFRDSQQQVIERLWQAHAAGDLATLGFLAHSLQGNAGNIGATAVKEAAGQLEEQAGGPAALGPLIEQLARCLEPVLAGLASLPGAADGDLAPQQLGLDPEQVLALERLAKLLSSHNAQALALIDELYEQYPCGPLRAIQERIYRLEFQQAHDLLVDFQG

SEQ ID NO: 51236 - protein, 479 aa, Candida albicans SC5314
MNSKEIRIVALLILDTVFFLLEAIIGYTVHSLALIADSFHMLNDIISLIIALWAVRVKNTKPADGKYTYGWQRAEILGALINAVFLLALCFTIIMDSIQRFFEPQEISNPKLILIVGIAGLVSNGVGLVLFHEHGHSHSHGSSGGSDHSGDSKSHSHSHSHGEATTFSQGDEEEHIGTEENEHTPLLYNITHTTMKSTPSEVFDYLPDNVVERYSNYQPSFSGQSPLNGTSANSSDANTVVNNNNTSEHSGTNNNTPQSALQKIKQKSMNMEGVFLHVLGDALGNIGVIITALVIWKTDYSWRFLADPITSLFITLIILNSALPLVRKASRILLQSAPPYIDSNLIVNQIKQLPLIKNIHDFHVWNLNEDILIASLHIELNPNCEVNLPLPLPSNGGGGGDNNNNNNNTKNGSNGDSSIDEEQDQDQELELEEAPSQIDRKLFLAAVGQVREVLHIYGINSVTIQPEFSNSKKVCRSIF

SEQ ID NO: 51237 - protein, 98 aa, Neorickettsia sp. SF agent
MKVGLKMLHDQVLIRPHEEKDGAGGIYIPDSAKKKPTMGLVVAVGAGAKNSNGTLDPMCVKEGDVVLYRKWAGSEVEHDGVEYVVMKETDIIAIKEGK

SEQ ID NO: 51238 - protein, 296 aa, Zea mays subsp. parviglumis
RPEIAHAHQPVMSPSHHGWDGNGAAAVPTPMPKRLDGKVAIVTGGARGIGEAIVRLFAKHGARVVIADIDDAAGEALASALGPQVSFVRCDVSVEDDVRRAVDWALSRHGGRLDVYCNNAGVLGRQTRAARSILSFDAAEFDRVLRVNALGAALGMKHAARAMAPRRAGSIVSVASVAAVLGGLGPHAYTASKHAIVGLTKNAACELGAHGVRVNCVSPFGVATPMLINAWRQGHDDATADADRDLDLDVTVPSDQEVEKMEEVVRGLATLKGPTLRPRDIAEAVLFLASDEARYI

SEQ ID NO: 51239 - protein, 546 aa, Neorickettsia sp. SF agent
MANEVISGEQLQKVIRDAADLVVSSAGVTLGPEGRPVIMSKSYGGPEVTKDGYKVINQLKPEDDKVAKIVELLNQATSQANEKAGDGTTTATILVGNMIKNAHKHIAAQRSRMKLKSGMKRARDEVVKYIQSVARKINSEEEIAQVGSISANGNSEIGNKIAEAMSKVGKEGVITVEEGKGLDEFSVSVVQGMVFDRGYVSPYFITNPEKMIVEFDNPYILLANKKLSSIQPMVPLLETIVRSNRAVVIIAEDVEGEALTSLVLSKMRGSLKACAVKAPGFGDRRSEMLEDIRILTGAKTLVSDDLGVTVESLTVEDLGTAKSIIISKDSTTIVDGGGEKAAIEARVKQIKTQIDKTTSDYDKEKLQERLAKLAGGVAVLKVGGATEVEVKERKDRVEDALHATRAAVEEGIVPGGGATLLSAIAVLEKLSSDDDDEQAGINIVKAALKAPISQIVENAGEDASVIIYNLLESKDPNRIFDARELKYVDAFKAGIIDPAKVVRVALESAVSVASVLVTTEALIVDLPSKDNGSSSMMPGGGMGGMG

SEQ ID NO: 51240 - protein, 493 aa, Corynebacterium diphtheriae NCTC 13129
MTNAFSRRQFLLGGLVLAGTGAVAACTSDPGPAASAPGSSLRPTPTPTALGEPTVRRTLTARPLSLDIGGIEAKTWGYVSDTGDAAIEATAGDVLQVDITNELPESTSIHWHGIALHNAADGVPGMTQDPIEPGESFSYVFEVPHGGTYFYHSHTGLQLDRGLHAPLIIRDPQDAEDQDVEWTIVLDDWVDGIQGTPDDELDKLTGMGSGDHNGKKGMGGHGHMMHGTPDRVLGGDAGDVMYPHYLINGRIPRAHRTFEARPGDKARLRFINSGGDTIFKVALGGHRMTVTHTDGFPVQPWETESIYLSMGERVDVEVILGDGIFPLTALAVGKDDRAFAVIRTAGGQAPHPDVDFPELSSTGLLLSSLKPADRALLPEGTPDREVSIDLGGQMMPYEWRILTDGQSSSATVQEGQRLRMVMRNRTMMPHPMHIHGHTWALPGSGGLRKDTVLLRHGETMIADLIADNPGEWAFHCHNAYHMETGMLSSLRYE

SEQ ID NO: 51241 - protein, 298 aa, Zea mays subsp. parviglumis
RPEIAHAHQPVMSPSHHGWDGNGAAAVPTPMPKRLDGKVAIVTGGARGIGEAIVRLFAKHGARVVIADIDDAAGEALASALGPQVSFVRCDVSVEDDVRRAVDWALSRHGGRLDVYCNNAGVLGRQTRAARSILSFDAAEFDRVLRVNALGAALGMKHAARAMAPRRAGSIVSVASVAAVLGGLGPHAYTASKHAIVGLTKNAACELGAHGVRVNCVSPFGVATPMLINAWRQGHDDATADADRDRDLDLDVTVPSDQEVEKMEEVVRGLATLKGPTLRPRDIAEAVLFLASDEARYI

SEQ ID NO: 51242 - protein, 212 aa, Triticum aestivum
  misc_feature (182)..(182): Xaa can be any naturally occurring amino acid
  misc_feature (203)..(203): Xaa can be any naturally occurring amino acid
  misc_feature (206)..(206): Xaa can be any naturally occurring amino acid
  unsure (1)..(212): unsure at all Xaa locations
MQIFVKTLTGKTITLEVESSDTIDNVKAKIQDKEGIPPDQQRLIFAGKQLEDGRTLADYNIQKESTLHLVLRLRGGMQIFVKTLTGKTITLEVESSDTIDNVKAKIQDKEGIPPDQQRLIFAGKQLEDGRTLADYNIQKESTLHLVLRLRGGMQIFVKTLTGKTITLEVESSDTIDNVKAKXQDKEGIPSDQQRLIFAGKQLXEDXRTLADY

SEQ ID NO: 51243 - protein, 390 aa, Prochlorococcus marinus subsp. pastoris str. CCMP1986
MAQQTIESNNKKSVNRGKDIAKDTILTPNFYTTDFEAMEKMDLSINEDELEAICEEFRKDYNRHHFVRNKEFEGAADKIDAETRELFVDFLEGSCTSEFSGFLLYKELSKRIKDKNPLLAECFAHMARDEARHAGFLNKSMNDFGLQLDLGFLTANKDYTYFAPRAIFYATYISEKIGYWRYIAIYRHLEKNPSGKIFPLFNFFENWCQDENRHGDFFDALMKAQPRTVKSLSQKIEIFGYTLKHPIFDYYHRFRYFLNNHPIVSKLWSRFFLLAVFATMYIRDLGTKRNFYGALGLNAREYDQFVINKTNETSAKVFPVVLNVYDKSFYKRLDRIVENGTRLSEIDKKENPNVIKVLSKLPIFISNGYQLIRLYLLKPLESDDFQPSIR

SEQ ID NO: 51244 - protein, 469 aa, Pseudomonas fluorescens Pf-5
MSQIEDTTVPAQSTADAAQPQLKAARPLAANIKIKDGFPVMPGKIPLLGHVHKIGKDALGELRQAEAACGPMFWTYFGSQLPVLQIVDEAGLAILQNKYTDNSFLREQMPVITGEAMNAFDGPRHRNARKASTDAFTPKGLTRAKVGQFIMETIDQRLKHWSRENQLAIFPQTKDIALEVVFRILGIATHELELWRHQYEEFFLGMIPLKINLPGFPAWRCRKARGWLEQRVAQIVATTRANNDHDSLVGAMILGRDEQGNGLSEVELVHNILGLGFAGSETTAAVMAWSALMLSQHPDVWQQLCEQVAGLESLPVTHEELVRQVPLAEGIFRETMRLYPPAPFEMRKVHTEFELLGQRIPAGVMAGVSLLHVSRNPERYPDPDSWRPERWLGLDRALNQVETCQFGGGPHACLGRHVAALEITLFIAMLARELGPKGNVPRLVGKMPPPAYLPFLRPSNKAFLDFSGA

SEQ ID NO: 51245 - protein, 351 aa, Acinetobacter sp. ADP1
MNKNTPILVTGATGYVAGWIIERLLNQGHTVHATVRDPSNTEKIKHLTDIAKKSEGSIHFFKADLLSEGVFDEAMQGCEIVIHTASPFVITNYKDAVKDIIEPAVNGTANVLESVNRTESVKRVVVTSSIAATYGDAIEIKATSNNEFDESCWNNTSNATHQPYSYSKVAAERKAWEMADQQNRWSLVCINPALVMGPSLTASSQSGSIELLQQFANGVTLFGVPSMWNGIVDVRDVADAHVAAALLPDASGRYIISGGSLSLLDMGKALTQRFGYRFPFPHFTVPKTAFSFVAPFLGYSREFVKLNMGYPIYFNAKRSQEELNIQYRDIRESVCDHFQQLLDDGVIKKWL

SEQ ID NO: 51246 - protein, 369 aa, Bordetella bronchiseptica RB50
MNTARSLDKMVPVTILTGFLGAGKTTLLKRILTEYHGRRVAVIENEFGPESIDNDLLVQDRDEEIIELSNGCVCCTVRGDLMRTLSDLRARREAGELSFERVIIETTGMANPGPVCQTFFMDDDIAEYYRLDAVVTVVDAKHGMATLDAQDEAQKQVGFADRILVSKKDLVNDVDYAALHQRLVRINPRAPITPVHFGEADLKSIIDISGFNLNSILDIDPAFLADEHPDAAHDHHDHDHGHGHEHDHDHEGECGAHCNHHHHHHHAHHDDEIGAFVFRSNKPFDPARLEEFLGGVVQVYGPDLLRYKGILYMKGINRRMLFQGVHMMMGAEPGKAWTAAEKPSTKMVFIGRKLPQEIFTRGLEQCLVG

SEQ ID NO: 51247 - protein, 184 aa, Brassica napus
  misc_feature (22)..(22): Xaa can be any naturally occurring amino acid
  unsure (1)..(184): unsure at all Xaa locations
WNMGFLYNECLKNQAVSFGGYXLDGCGEFMPKSTTILTDPPSLSCDACGCHRNFHRRDPSNVFIHRTNSTPPPPPLQPVASTQHLLLSLSGSGFSGPSDQDMGKISTVDRKRKRTKFTVKQKVMMRAFAERAGWKINGCDDEYVREFCREVGVEREVLKVWIHNNKYFANGRNRNTTSSMFQKL

SEQ ID NO: 51248 - protein, 536 aa, Zea mays
  misc_feature (200)..(200): Xaa can be any naturally occurring amino acid
  unsure (1)..(536): unsure at all Xaa locations
MAGAATPPPSSSSSASCGTDAAYLLFRGETLLPDGVHASLYAVALAYCFVGLSAVTARFFKSMEQIMRHSREVVVGVDPRTGAPVVRRDKVWNYTVADIALLAFGTSFPKISLATIDAIRNLGQLTAGGSLGPGTLIGSVVFDLFLIHAVCVVMPRAGSKKISDLGVWLVELFWSFWAYIWLYVILKVWTPRVITLWEAXLTVLQYGLLLLHAYAQDKRWPFVARGERPEDWVPPEDVSAVYYAKCDGIDETLPMGADGNDGIVDIFSAHSYYDAAECSQLAEEDMEGSSTMDQVVKNTQENMFWLSIWWQQFVDASTQYMPHASAESMKMDSVCLRYTRIFWNLIIAPWKFLFAFVPPYHIAHGWIAFICSLVFISGIAYGVTKLTDQISCVTGVSPYVIAFTALAAGTSWPDLVASKIAAERQVTADSAIANITCSNSVNIYVGIGVPWLIDTVYNFFVYREPLYIDNAAGLSFSLLVFFATSFGCITVLVLRRIILGAELGGPRLWAWVTSVYFMILWVVFVVFSSLRVSGVI

SEQ ID NO: 51249 - protein, 330 aa, Triticum aestivum
  misc_feature (122)..(122): Xaa can be any naturally occurring amino acid
  misc_feature (302)..(302): Xaa can be any naturally occurring amino acid
  misc_feature (312)..(312): Xaa can be any naturally occurring amino acid
  misc_feature (315)..(315): Xaa can be any naturally occurring amino acid
  unsure (1)..(330): unsure at all Xaa locations
MSWWWAGAVGAVKKRQDERAAAAEPTFQSVALILGSTGIVGTSLLDILPRDDTPGGPWKVYAVSRRAPPGWSTPPPSPAVTHLQLDLADAAAVRDALTPLTDVTHVFYAAWSSHETEDRNRXEVNAGMLRNVLSVVVPNCPALAHVCLQTGRKHYVGPFEAIGKIPAPDPPYTEDMPRLDHPNFYYDLEDVLFDHVSGRDGAVTWSVHRPTVIFGFSPRSAMNVVGSLCVYAAICRKEGATLRWPGCKVAWEGFTDASDADLVAEHEIWAAVDPFAKNEAFNCSNGDVFKWKQLWPMLAERXRVGWARYEGXEDXRVGLADAMTGKEAVW

SEQ ID NO: 51250 - protein, 165 aa, Magnaporthe grisea 70-15
MSDSPQSNPKEIEGAHTPDEEAQMNDPQDPQSAGLGYEFEVKEQDRWLPIANASEKCHQEKRKTVNGEDILFAMTSLGFENYSEALKIYLAKYREQNQSTRGEGQQNRPSSQGYGAPPGAAPGTNATAGFPGGELGQQGTEAPGDASGYLYSTQPGHNGATAGEY

SEQ ID NO: 51251 - protein, 385 aa, Oceanobacillus iheyensis HTE831
MSECIGMLLAGGEGKRLGMLTKQGAKPAVPFGGKYRIIDFTLSNCTNSGIQTVGILTQYAPLELNKHIGNGKPWDMNHQHGGVSILPPYTGTKGGDWYSGTADAIYQNMNFIHQYEPEYVLIISGDHIYQMDYQQMLEQHKRTNADVTISVIEVPWAEAGRFGILHANDEQIIYEFEEKPKNPSSNLASMGIYIFNWKTLKKYLIEDANKPNSSRDFGKDIIPSMLNNQHRLYAFKFNGYWKDVGTIQSYWEANMDVLKDNNGYFSLHDRNWRIYTHDSNLPPHFIGTNGKAVNSYINSGSIIYGHIKNSIVFRNVSVQQGSYINQSIIHPNVKIGKDCVLDRVIVMENTTIPEGTIFRSDKEIEPFIINNEILNSMLAPAGGDV

SEQ ID NO: 51252 - protein, 446 aa, Pleurotus sajor-caju
MREIVHLQTGQCRNQIGAKFWEVVSDEHGIEPDGLYKGNNDLQLERISVYYNEVGANKYVPRAVLVDLEPGTMDSVRSGPLGSLFRPDNFVFGQSGGGNNWAKGHYTEGAELVDAVLDVVRKEAEGTDCLQGFQITHSLGGGTGAGMGTLLISKIREEYPDRMMCTYSVVPSPKVSDTVVEPYNATLSVHQLVENSDETFCIDNEALYDICFRTLKLTTPTYGDLNHLISIVMSGITTCLRFPGQLNSDLRKLAVNMVPFPRLHFFMPGVCPLTARGSQQYRAVTVPELTQQMFDAKNMMAASDPRHGRYLTVAAVFRGKVSMKEVEEQMQNVQNKNSAYFVEWIPNNVLTAQCDIPPRGCKMAVTFLGNSTAIQELFKRVNDQFAAMFKRKAFLHWYTQEGMDEMEFTEAESNMQDLVAEYQQYQDATADEEEGEYEEEPAEEEQ

SEQ ID NO: 51253 - protein, 442 aa, Acinetobacter sp. ADP1
MLYSIFIAHQESWMVDQFDLEHIWHPYTSMINPLPTFKVKRASGVMIELDDGRQLIDGMSSWWCAIHGYNHPALNQAVKDQLEQMSHIMFGGFTHDPAIELAKILLKITPPSLDKIFYADSGSVAVEVALKMAVQYWTAQGQHQKTNFITTRSGYHGDTWNAMSVCDPVTGMHQIFGASLPNRVFVSAPKSRFDGEWDSSEMDEVEQLIQQHTQLAAFIIEPIVQGAGGMRFYHPEYLRQLKQLCEKYQLLLIFDEIATGFGRTGKLFAWEHAQVEPDIMCIGKGLTGGYMTLSATLTSQHVAEVISRGEAGVFMHGPTFMGNPLACAVALKSTQLLVEQDWQSNIRRIENRLQPLYQLAALAHVADIRTLGAIGVVELKHNVDMKTLQQQFVELGIWIRPFGKLVYVMPPYIISNDELDELIQKMMNVVRQLSCEAQHGIA

SEQ ID NO: 51254 - protein, 172 aa, Oryza sativa
GFLEGGAGMADAGHDESGSPPRSGGVREQDRFLPIANISRIMKKAVPANGKIAKDAKETLQECVSEFISFVTSEASDKCQKEKRKTINGEDLLFAMGTLGFEEYVDPLKIYLHKYREMEGDSKLSSKAGDGSVKKDTIGPHSGASSSSAQGMVGAYTQGMGYMQPQYHNGDT

SEQ ID NO: 51255 - protein, 385 aa, Acinetobacter sp. ADP1
MALLDHYAQQLDQLKQSGNLRQFVANQQQGATIQITGQQMLNLSSNDYLGLAANVELREEFLQQQPVERCYFSSSSSRLLTGNYEEYEQLEASLSQAFYGRSALLFNSGYHMNIGILPAICDSRTLILADKLVHASMIDGIRLSVAKYVRYRHNDLQHLEQLLLKYHANDDIERIVVVTESIFSMDGDETDLDALVQIKRRFGKVMLYVDEAHAIGVRGEQGLGCAEQYQVINEIDFLVGTFGKAVASIGGYLICDPIIRSYLINTMRPLIFSTALPPLSIAWTNFIWKKMLTAQKQRQHLQQISNYLQNSIIQKGYSSPSTSHIVPVIIGESQAAVNMSKYVQTNGFYAMPVRPPTVPQHSARLRISLTSLIQIDELDRLVACL

SEQ ID NO: 51256 - protein, 368 aa, Oceanobacillus iheyensis HTE831
MERMMGLVNLEHEHHLLNELAYFRNPASIPFGGRYRLIDFTLSNMVNSSIQEVAIFVRNKYRSLLDHIGTGENWELDRRNGGLFILPPDWNDPTDRSRGDLKFFHNNRDYFNRSNSKYVLISGSQFISNTDYKEALEQHIKEQADVTLITVREEELSNEHESNLRVECDYIHRVQALTNDKNNPEIFTGVYIINKDLLIELVDNCIAYHKDHFFHAAIMERLGDLRVFRFRQEGYHAFINSVESFYKHNMKLLQEDSYQQLFLNNHFVRTKISNNAPVKYGEKAEVVNTLVANGCKVNGCIEGSILFRGVQLHEGATVKNSIIMQRCTIGSGVHLENVILDKDVVVTTGQRIIGSKEKPYVVAKRQVI

SEQ ID NO: 51257 - protein, 328 aa, Planobispora rosea
KTKPTQHSVAALRNIGIQPDAIVLRSDRPVTSAIKRKISLMCDVDEDAVVSAVDAAGIYDIPKVLHSEGLDAYVVRRLGLPFRDVVWKEWEQLLRRVHHPAKEVTIALVGKYIDLPDAYLSVTEAMRAGGFANDARVNIRWVKSDDCETPEGAERELDGVDGVVIPGGFGVRGIEGKLGAVRHARENRVPLLGLCLGMQCMVIEAARNLAGIEDAGSTEFDPETTHPVISTMADQEDVVSGERDMGGTMRLGLYPAKLAEGSLARQLYGKAKVDERHRHRYEVNNSYREQLEKVGMVFSGLSPDGRLVEYAELPVDVHPFFIGTQAHP

SEQ ID NO: 51258 - protein, 475 aa, Oryza sativa
MGGSREEDRQHHNHLPSELPLGFRSSSPTTMIASSSMSKESSNYDMADFDQASLFLYLDSHDQQSIQEQRQTLNIFPSQPMHVADPAHEAKSAGVAMAMLPNGNQLQVLASHPSKKPDQQGGQKINSSVPTNPPGPNLPLPNSAKDNKNSSLIKGPKKCGLQKEGSSSGKGATTSNDPEREGRRTLDPKTLRRLAQNREAARKSRLRKKAYIQQLESSRIRLSQLEQQVHVARVQGAMLGAGDQHQGLPSGPSAASLFDLEYGRWVEEHSKLIFQLRAALNEQMADSQLQVFVNGAMAQHDELLSLKGAIARADIFHLLCGVWATPAERCFLWLGGFRPSEAIKVMLKQVEPLSEGQLMSIYELQQAAKGTEDALSHAMDGLQQSLSDTVAAPDVAAAGGFMGHMSLAMNKISAMEDIVRQADGLRQQTLHKLQHMLTIRQAARCFVAISDYFHRLRALSTLWVARPRPEEGPAM

SEQ ID NO: 51259 - protein, 443 aa, Thalassiosira weissflogii
MREIVHIQGGQCGNQIGAKFWEVMSDEHGVDPTGTYHGDSDLQLERINVYFNEATGGRYVPRAILMDLEPGTMDSVRAGPFGQLFRPDNFVFGQTGAGNNWAKGHYTEGAELIDSVLDVVRKEAESCDCMQGFQLTHSMGGGTGAGMGTLLISKIREEYPDRVMSTYSVIPSPKVSDTVVEPYNATLSVHQLVENADQCFALDNEALYDICFRTLKLTTPTYGDLNHLIAAAVCGTTCCLRFPGQLNCDLRKLAVNMVPFPRLHFFMVGYAPLTSRGSQQYRALTVPELTQQCFDAKNMMCAADPRHGRYLTCAVLFRGRMSSKEVDEQMLNVVNKSSSYFVEWIPNNVKASICDIPPKGLKMATTFVGNTTAVQETWKRVAEQFTVMFRRKAFLHWYTGEGMDEMEFTEAESNMNDLVSEYQQYQDATADEEGEFDEDEMEG

SEQ ID NO: 51260 - protein, 403 aa, Triticum aestivum
  misc_feature (321)..(321): Xaa can be any naturally occurring amino acid
  unsure (1)..(403): unsure at all Xaa locations
MADPSPSSPTAASAGDALLAPDATLPAAAAPDLDKEFGFQRAELGKEKLAGTVGFHERHVFLCYKGPEEWPSHVEASESDHLPRHLAAAIKARKPNLKKSTKLTICEGGDGTESSLGDVLIFPDMIRYRELIHLDVDNFVEEVLVKDTEWLPGSPEAIKGSFVFVCCHGSRDKRCGVCGPALITRFKEEIEGQGLDGQAAVSACSHVGGHKYAGNVIIFSPDAKGEVTGHWYGYVAPDDVPVLLRQHIGQGEIVGHLWRGQLGLSEEQQKKALELRHATNGLTEEKSSAKESPEANGTNGAACNPAPAGGCCQGNGGGLTXCCQNDLPEAKQDKNIPAEQNHKSSTTESDKENGAASKKGRMKICRTPTWFETWDRSDTYTTLAVVASAATVFAAFRCYKAMN

SEQ ID NO: 51261 - protein, 328 aa, Clavibacter michiganensis subsp. insidiosus
KTKPTQHSVAALRSIGIQPDALVLRSDRPVSDSNKKKIALMCDVDEQAVVNAVDVPSIYDIPEMLHGQGLDSYIIDHLGLPAADAVDWSGWSDLLDAVHDPKHEVTVGLVGKYIDLPDAYLSVTEALRAGGFAHSARVKLRWVASDECETPEGAAKKLGDLDALCVPGGFGIRGIEGKLGALKFARDNMIPVLGLCLGLQCMVIEYARNEADLPGASSSEFDPDSAFPVVATMAEQVDIIAGGDLGGTMRLGLYEAALAPGSLAAELYGAPVSHERHRHRYEVNNQYRERIQDAGLVFSGTSPDGTLVEYVELPREVHPFYIGTQAHP

SEQ ID NO: 51262 - protein, 446 aa, Mycobacterium tuberculosis CDC1551
MTNHPRYSPPPQQPGTPGYAQGQQQTYSQQFDWRYPPSPPPQPTQYRQPYEALGGTRPGLIPGVIPTMTPPPGMVRQRPRAGMLAIGAVTIAVVSAGIGGAAASLVGFNRAPAGPSGGPVAASAAPSIPAANMPPGSVEQVAAKVVPSVVMLETDLGRQSEEGSGIILSAEGLILTNNHVIAAAAKPPLGSPPPKTTVTFSDGRTAPFTVVGADPTSDIAVVRVQGVSGLTPISLGSSSDLRVGQPVLAIGSPLGLEGTVTTGIVSALNRPVSTTGEAGNQNTVLDAIQTDAAINPGNSGGALVNMNAQLVGVNSAIATLGADSADAQSGSIGLGFAIPVDQAKRIADELISTGKASHASLGVQVTNDKDTPGAKIVEVVAGGAAANAGVPKGVVVTKVDDRPINSADALVAAVRSKAPGATVALTFQDPSGGSRTVQVTLGKAEQ

SEQ ID NO: 51263 - protein, 327 aa, Tsukamurella paurometabola
KTKPTQHSVAALRSIGITPDALVLRCDREVPEGQRNKIALMCDVEVEGVISCPDASSIYDVPKVLHGNQLDAYVVRKLGLPFRDVDWSVWGDLLKRVHEPRETVRIALVGKYIDLPDAYLSVTEALRAGGFANWAKVQITWVPSDDCETDAGAAAALRDIDGILIPGGFGIRGIEGKVGAIRYARKRGLPLLGLCLGLQCIVIEAARSAGLDGASSAEFEPDAKYPVISTMADQEQAVAGEADLGGTMRLGAYPAVLERGSIIAGAYGATEVSERHRHRFEVNNAYRDTIAESGLKFSGVSPDGHLVEFVEYPKEVHPFLVGTQAHP

SEQ ID NO: 51264 - protein, 400 aa, Xylella fastidiosa Ann-1
MPLFTDVELVPGDPILSLNDAYNADTRTNKVNLGIGIYCDESGCIPLLRAVQQVEEQLAKHPKPRGYLPIDGLPAYIKATQQLLFGVDSLLLTAGRVATSQTVGGSGALRVAAEVLKQVLPHATVAISRPSWENHRALFTAAGFKIEDYTYFDTLGHAVDFTGMVADLAKLQPKTVVLLHGCCHNPTGADLSRDQWKQLVALFQERQLLPCIDLAYQGFNQGIDADAYAIRLLAEEGISNYVVANSYSKSFSLYGERVGGLSIVASNTEQAQAIQSQVKRIIRTIYSSPPAHGAYLVASVLNSHELRTLWEQELAQMRERIHGLRAGLVTRLKALGVPEFDFIQRQAGMFSYSGLSKIQVDRLRDEFGIYAVSSGRICLAALSQHKLEYVAQAVVKVHQG

SEQ ID NO: 51265 - protein, 327 aa, Nocardia corynebacterioides
KTKPTQHSVAALRSIGIQPDALILRSDRDVPDGLKRKIALMCDVDVDGCISTPDAPSIYDIPKVLHGEGLDAYVVRKLGLPFRDVDWSVWGTLLERVHSPRETVRVALVGKYVDLPDAYLSVTEALRAGGFANRAKVELVWVQSDDCDTAAGARLALADIDAVVIPGGFGIRGIEGKLGAITHARTHRIPTLGLCLGLQCMVIEAARSVGLSDANSAEFEPETTQPVISTMADQEQAVAGEADLGGTMRLGAYPATLAKGSVVAQTYGSESVSERHRHRYEVNNSYRDRIAASGLQFSGTSPDGHLVEFVELPKKTHPFFVGTQAHP

SEQ ID NO: 51266 - protein, 328 aa, Pimelobacter simplex
KTKPTQHSVAALRQVGIQPDAVVCRADRELPESIKKKISLMCDVDQDAVVTAADAPSIYDIPKVLHRQGLDAYVVRRLNLPFRDVDWTVWDDLLRRVHHPKEEVTIALVGKYIDLHDAYLSVTEALRAGGFAHEAKVNLRWVASDECETPAGATKHLADVDGICVPGGFGIRGLEGKLGALTYARHHGIPTLGLCLGLQSMVIEYARTELGLTKAGSTEFDPDTPEPVIATMEEQKSIVEGAGDLGGTMRLGLYPAQLKAGTIAREVYGAEVIEERHRHRYEVNNAYRSQLEEAGLVFSGLNTELDLVEFVELPRDVHPYYVGTQAHP

SEQ ID NO: 51267 - protein, 298 aa, Oryza sativa
MPPQPCPPEDAALQHLRRATGHDDGVPAAGEQPPSRRPIHRRDFPCTTMASRDHSGLTRQLLDFQHGTVDEIDGEHDPFMELKARFMDFKHRNCVDNISNYQNLAQQQTPKFMVVACADSRVCPSSVLGFQPGEAFTVRNIANLVPPYQHGASETSAALEFAVNTLEVENVLVVGHSRCGGIQALMSMKSKQDDSQSRSFIRDWVSIAKSARLSTEAAAGNLNFELQCKHCEKESINSSLLNLLTYPWIEKRVNEGTLSLHGGYYNFIDCTFEKWKLVYRQGLEGGSKYAIKNRTAWS

SEQ ID NO: 51268 - protein, 246 aa, Neurospora crassa
MDKNLNQLLKWSIEAQTAANAGQSYHSNGAPTPNNNSGPATGTGAVATSPAPQVTGSGPRPVDPEVLASLFGGPSEAELMKAAMEVITDPSPETTRENKLIAFDNFEQLIENLDNANLLEELSLWSPLISLLDHEDEDMRYHAAWCLGTAVQNNQKTQERLLAMGGVPKLVDLAMKEGESEKVRRKATYALSSAVRNYQPAMDVAADEMHKRGHEVLVNNGTKVDAADMDKVDEVIDVLRNKAKSA

SEQ ID NO: 51269 - protein, 184 aa, Yersinia pestis KIM
MSHPIYAISVQTIDHQLVKLAKYKGSVLLVVNVASQCGLTQQYEGLESLYKTYQKQGFEVLGFPSNEFAGQEPGSDEEIHAFCRGTFGVDFPMFSKIEVNGPHRHPLYQHLVTAKPVAVKPEGSEFYQRLASKGREPKQPGDILWNFEKFLISRDGTVLARFAPDMAPEAPILINAINQALASH

SEQ ID NO: 51270 - protein, 298 aa, Zea mays subsp. parviglumis
RPEIAHAHQPVMSPSHHGWDGNGAAAVPTPMPKRLDGKVAIVTGGARGIGEAIVRLFAKHGARVVIADIDDAAGEALASALGPQVSFVRCDVSVEDDVRRAVDWALSRHGGRLDVYCNNAGVLGRQTRAARSILSFDAAEFDRVLRVNALGAALGMKHAARAMAPRRAGSIVSVASVAAVLGGLGPHAYTASKHAIVGLTKNAACELGAHGVRVNCVSPFGVATPMLINAWRQGHDDATADADRDLDLDLDVTVPSDQEVEKMEEVVRGLATLKGPTLRPRDIAEAVLFLASDEARYI

SEQ ID NO: 51271 - protein, 289 aa, Zea mays subsp. parviglumis
RPEIAHAHQPVMSPSHHGWDGNGAAAVPTPMPKRLDGKVAIVTGGARGIGEAIVRLFAKHGARVVIADIDDAAGEALASALGPQVSFVRCDVSVEDDVRRAVDWALSRHGGRLDVYCNNAGVLGRQTRAARSILSFDASEFDRVLRVNALGAALGMKHAARAMAPRRAGSIVSVASVAAVLGGLGPHAYTASKQAIVGLTKNAACELGAHGVRVNCVSPFGVATPMLINAWRQGHDDATADADRDLDLDVTVPSDQEVEKMEEVVRGLATLKGPTLRPRDIAEAVLFLA

SEQ ID NO: 51272 - protein, 154 aa, Bacteroides thetaiotaomicron VPI-5482
MIEKTLVILKPCTLQRGLVGEITHLFERKGLRLAGMKMMQLTDELLSEHYAHLSSKPFFQRVKDSMMATPVIVCCYEGVDAIQAVRTLAGPTNGRLAAPGTIRGDYSMSFQENIVHTSDSPETAAIELTRFFKPEEIFDYKQATFDYLYANDEY

SEQ ID NO: 51273 - protein, 1167 aa, Neurospora crassa
MNNNYYGSPLSPEELQHQMHQHQQQQQQQQQQQQQQQQQQQQQQQQQQQQHQHQQQQKTNQHRNAGMMNTPPTTNQGNSTIHASDVTMSGGSDSLDEIIQQNLDEMHRRRSVPQPYGGQTRRLSMFDYANPNDGFSDYQLDNMSGNYGDMTGGMGMSGHSSPYAGQNIMAMSDHSGGYSHMSPNVMGNMMTYPNLNMYHSPPIENPYSSAGLDTIRTDFSMDMNMDSGSVSAASVHPTPGLNKQDDEMMTMEQGFGGGDDANASHQAQQNMGGLTPAMTPAMTPAMTPGVSNFAQGMATPVSQDAASTPATTFQSPSLSATTQTIRIGPPPPPSVTNAPTPAPFTSTPSGGGASQTKSIYSKSGFDMLRALWYVASRKDPKLKLGAVDMSCAFVVCDVTLNDCPIIYVSDNFQNLTGYSRHEIVGRNCRFLQAPDGNVEAGTKREFVENNAVYTLKKTIAEGQEIQQSLINYRKGGKPFLNLLTMIPIPWDTEEIRYFIGFQIDLVECPDAIIGQEGNGPMQVNYTHSDIGQYIWTPPTQKQLEPADGQTLGVDDVSTLLQQCNSKGVASDWHKQSWDKMLLENADDVVHVLSLKGLFLYLSPACKKVLEYDASDLVGTSLSSICHPSDIVPVTRELKEAQQHTPVNIVFRIRRKNSGYTWFESHGTLFNEQGKGRKCIILVGRKRPVFALHRKDLELNGGIGDSEIWTKVSTSGMFLFVSSNVRSLLDLLPENLQGTSMQDLMRKESRAEFGRTIEKARKGKIASCKHEVQNKRGQVLQAYTTFYPGDGGEGQRPTFLLAQTKLLKASSRTLAPATVTVKNMSPGGVPLSPMKGIQTDSDSNTLMGGMSKSGSSDSTGAMVSARSSAGPGQDAALDADNIFDELKTTRCTSWQYELRQMEKVNRMLAEELAQLLSNKKKRKRRKGGGNMVRDCANCHTRNTPEWRRGPSGNRDLCNSCGLRWAKQTGRVSPRTSSRGGNGDSMSKKSNSPSHSSPLHREVGNDSPSTTTATKNSPSLRGSSTTAPGTITTDSGPAVASSASGTGSTTIATSANSAASTVNALGPPATGPSGGSPAQHLPPHLQGTHLNAQAMQRVHQHKQHQQHQQQHQQQHQQQHQQQHQQLQQHQFNPPQSQPLLEGGSGFRGSGMEMTSIREEMGEHQQGLSV

SEQ ID NO: 51274 - protein, 702 aa, Cryptococcus neoformans var. neoformans JEC21
MLSLLITGGQPITTRAFQRSVHGALGRSVAAIHRPLLARPLTNRATSNGVLAALKTSNSAHQRGLQTEKRSRNAIHLGLRLPIVKRSLHSSRISRNTLKPNIPPIPPTRLFNLHRRLRRLRNFLILLSLLSILYYTYPPFRHTAIAVIRCARVMKAVSIDVWDYKQVFAAEERLRATGRELTDEEIEMKRKTRRACHKRSAERLLEALKKNSGIYVKLGQHVAAVQVLPKEWTETMRPLQDQCFPTPVQRTDEMLRDDLGMGIDDIFTDFEPNPIGVASLAQVHRAVDKRTGRAVAVKVQHADLQEFAAVDMATVNFAIHFVKYIFPDFEFSWLGEEMNEMLPLEMDFRHEAANSARCMGDFLHLKGKTSLYLPEVFWAERRCMVMEFIDGGRVDDLMYLKKHKIDRNQVSQELARIFSQMVYINGYFHADPHHGNLLIRPKASGSTSPFNFDVCLLDHGQYFDVPDDLRVNYAHFWLSLIKSTSKKTIAERRHYARLVGNIDDDMYPILESAITGQINMADESNTHDSANDPRPTSLLDSKTFDKDQIRKLRTAMLEREGLIASIFELLRIVPRRMLMILKLSDLQRSLDQSLVTTHGQSRVFVIVARYCAKAVWQADYANFRKSLSTQGFSLNLFKSFISSFFDYAYWNTTLGLVELGLDARARSIKIALWFDGLVKGGLKAAEAEMAGLSLNGAIPATV

SEQ ID NO: 51275 - protein, 380 aa, Vibrio vulnificus CMCP6
MPSSLTKKGELGGAGLRGQSAGSTALCTVGKTGTGLTYRGYDITDLANHAQFEEVAYLLLRGHLPTQQELDAYKTRLIGLRGLPVELKQALELIPASAHPMDVMRTGCSVLGNLEQETDFSQQLDATERMLALFPAIICYWYRFSHDGVRIDTQDQSQDCIGGYFLKMLTGKEPSELHKQVMHCSLILYAEHEFNASTFAARVCASTLSDIHSCVTAAIGTLRGPLHGGANEAAMEMIENWQTPEEAESNILRMLANKEKIMGFGHAIYRESDPRNALIKRWSKALSEAVGDTHLYAVSERVEAVMKREKDLFCNADFFHASAYHFMDIPTKLFTPIFVMSRLTGWTAHVFEQRANNRIIRPSADYIGPDHQDWVPIEQR

SEQ ID NO: 51276 - protein, 275 aa, Burkholderia pseudomallei K96243
MTDRHASASPFPVAALQMVSTPDRERNLAEAGRLIADAAASGARLVLLPEYFCFMGHQDTDKLALAEAYRDGPIQRFLAERAKAHGIWVIGGTLPLKAPEPSRVLNTTLVFDPQGREAARYDKIHLFNFEKGDESFDEARTIRPGDAVRTFDAPFGRVGLSVCYDLRFPELYRRMGDCAMIVVPSAFTYTTGRAHWETLLRARAVENQCYVLAAAQGGKHENGRRTWGRSMLVDPWGEIVAVRDEGAGVVAGEIDPARIADVRQSLPAWRHRVLA

SEQ ID NO: 51277 - protein, 448 aa, Melampsora lini
MREIVHLQTGQCGNQIGAKFWEVVSDEHGIATDGQYKGTSDLQLERISVYYNEVAGNKYVPRAVLIDLEPGTMDSVRSGPFGSLFRPDNFVFGQSGAGNNWAKGHYTEGAELVDSVLDVVRKEAEGCDCLQGFQITHSLGGGTGAGMGTLLISKIREEFPDRMMATFSVVPSPKVSDTVVEPYNATLSVHQLVENSDETFCIDNEALYDICFRTLKLQTPTYGDLNHLVSIVMSGITTCLRFPGQLNSDLRKLAVNMVPFPRLHFFMVGFAPLTARGSQQYRAVTVPELTSQMFDAKNMMAASDPRHGRYLTVAAYFRGKVSMKEVEENMLSVQSKNSNYFVEWIPNNVQTAHCDIAPRGLKMSVTFIGNSTAIQDLFKRIADQFTAMFRRKAFLHWYTGEGMDEMEFTEAESNMQDLVAEYQQYQEAHVDEDEVDEEVYEDEAPPEE

SEQ ID NO: 51278 - protein, 242 aa, Zea mays
  misc_feature (224)..(224): Xaa can be any naturally occurring amino acid
  unsure (1)..(242): unsure at all Xaa locations
MAMDAERRQAELIAQFSAQAAALSFAPQLAALVLEATSHPALFAFSELLTLPALSKLTGTQYASSLDLLRLFAYGTLNDYKSNSGFLPALLPDQVRKLKQLSVLTLAESTKILPYDQLMQELDVSNVRELEDFLINECMYSGIVRGKLDQLRRCFEVQFAAGRDLTPDQLKNMIETLSDWLGTSDRLLHQIQEKIKWADTMSEVNKKHQKEFEDRVEEAKKSIXRQTLTYGGMTSFSLNLEE

SEQ ID NO: 51279 - protein, 349 aa, Pseudomonas putida KT2440
MREQLDQVGSGGVTGATGLLGNNLVRELVARGYTVKGLVRSKAKGEQQFNNLPGVELVVGDMAEVDAFAASLQGCDTVFHTASFFRDNYKGGSHWKELEQINVSGTRRLLEQAYGAGIRRFIHTSSIAVLNGAPGTSIEENCLRADADADDYYRSKILADRVVLSFLESHPQMHACMVLPGWMWGPGDVGPTSSGQLVNDVVQGKLPGLIPGSFSIVDARDVALAHIAAARHGRRGERYLAAGRHMTMRELMPVLGRMAGVKTPARQIPLPFLYTLAAVQEIYARLTGRPILLSMATLRLLVREQDRTRFDHRKSEQELGLSFRALELTIADTVAWYRDHGWFEKGSRL

SEQ ID NO: 51280 - protein, 466 aa, Escherichia coli O157:H7 EDL933
MDQKLLTDFRSELLDSRFGAKAISTIAESKRFPLHEMRDDVAFQIINDELYLDGNARQNLATFCQTWDDENVHKLMDLSINKNWIDKEEYPQSAAIDLRCVNMVADLWHAPAPKNGQAVGTNTIGSSEACMLGGMAMKWRWRKRMEAAGKPTDKPNLVCGPVQICWHKFARYWDVELREIPMRPGQLFMDPKRMIEACDENTIGVVPTFGVTYTGNYEFPQPLHDALDKFQADTGIDIDMHIDAASGGFLAPFVAPDIVWDFRLPRVKSISASGHKFGLAPLGCGWVIWRDEEALPQELVFNVDYLGGQIGTFAINFSRPAGQVIAQYYEFLRLGREGYTKVQNASYQVAAYLADEIAKLGPYEFICTGRPDEGIPAVCFKLKEGEDPGYTLYDLSERLRLRGWQVPAFTLGGEATDIVVMRIMCRRGFEMDFAELLLEDYKASLKYLSDHPKLQGIAQQNSFKHT

SEQ ID NO: 51281 - protein, 231 aa, Sulfolobus solfataricus P2
MKVTNLSEKEERGGELTEAEKEELRKSEKGAIIELLVPVDTYLSAGVHIGTHSCTKYMESFVYRVRAEGLYVLDVRKIDERLRIAAKFLSRYDPQDIIVVASRPYAYRPVQKFAEVVGSRALVGRIIPGTFTNPYLSTYIEPKVLLVSDPRTDTQAIKEAAKVGIPIVAFADTDAKIDYIDLIIPANNKGRKSLALLYWALARQILRERRVIPPDGDLAVPVSEFEMRLVQ

SEQ ID NO: 51282 - protein, 156 aa, Prunus avium
MQIFVKTLTGKTITLEVESSDTIDNVKAKIQDKEGIPPDQQRLIFAGKQLEDGRTLADYNIQKESTLHLVLRLRGGAKKRKKKTYTKPKKIKHKKKKVKLAVLQFYKGDDSGKVQKLRKECPNAECGAGTFMANHFDRHYCGKCGLTYVYQKAGGD

SEQ ID NO: 51283 - protein, 356 aa, Nicotiana tabacum
MDKYELVKDIGSGNFGVARLMRHKETKELVAMKYIERGHKIDENVAREIINHRSLRHPNIIRFKEVLVTPTHLAIVMEYAAGGELFERICNAGRFSEDEARYFFQQLISGVHYCHNMQICHRDLKLENTLLDGSPAPRLKICDFGYSKSSLLHSRPKSTVGTPAYIAPEVLSRREYDGKLADVWSCGVTLYVMLVGAYPFEDQEDPKNFRKTIQRIMAVQYKIPDYVHISQDCRHLLSRIFVANPARRITIKEIKSHPWFLKNLPRELTEAAQAAYYRRENPTFSLQSVEEIMKIVEEAKTPAPASRSVSGFGWGGEEEEEEKEGDVEEEEEDEEEEDEYEKQVKQAHESGEVRLT

SEQ ID NO: 51284 - protein, 156 aa, Arabidopsis thaliana
MSLVPTFFGGRRTNVFDPFSLDVWDPFEGFLTPGLTNAPAKDVAAFTNAKVDWRETPEAHVFKADVPGLKKEEVKVEVEDGNILQISGERSSENEEKSDTWHRVERSSGKFMRRFRLPENAKVEEVKASMENGVLSVTVPKVQESKPEVKSVDISG

SEQ ID NO: 51285 - protein, 327 aa, Yersinia pestis KIM
MSLNEPIKKVSIVIPVYNEQESLPALIDRTTAACKLLTQAYEIILVDDGSSDNSTELLTAAANDPDSHIIAILLNRNYGQHSAIMAGFNQVSGDLIITLDADLQNPPEETPRLVHVAEEGYDVVGTVRANRQDSLFRKTASRMINMMIQRATGKSMGDYGCMLRAYRRHIVEAMLHCHERSTFIPILANTFARRTTEITVHHAEREFGNSKYSLMRLINLMYDLITCLTTTPLRLLSLVGSAIALLGFTFSVLLVALRLIFGPEWAGGGVFTLFAVLFMFIGAQFVGMGLLGEYIGRIYNDVRARPRYFVQKVVGAEQTENNQDVEK

SEQ ID NO: 51286 - protein, 673 aa, Oryza sativa (japonica cultivar-group)
MLLSSASRALAAAKPRSPEPFAAAAAVLLRRQLAAGMAAAPASSASAAGNREAFRVAVTNTLERRLFYVPSFKIYGGVAGLYDYGPPGCAVKANVLAFWRQHFVLEEGMLEVDCPCVTPEVVLKASGHVDKFTDLMVKDEKTGTCYRADHLLKDFCKDKLEKDNTLSPEKTAEFNHVLAVLDDLSAEQLGAKIKEYGIVAPDTKNPLSDPYPFNLMFQTSIGPSGLSPGYMRPETAQGIFVNFKDLYYYNGNKLPFAAAQIGQAFRNEISPRQGLLRVREFTLAEIEHFVDPEDKSHPKFRDVSDLEFFMFPREQQLTGKSAMKLNIGQAVSEGTVNNETLGYFIGRVYLFLTQLGIDKDRLRFRQHLPNEMAHYAADCWDAEIECSFGWIECVGIADRSAYDLRAHSDKSGVALEAHEKFAEPREVEKLVITPSKKELGLAFKGNQRMVLEALEAMSETEALNMKSALESKGEVEFKVCTLGKDVTIKKSMVSINMEKKKEHQRKFTPSVIEPSFGIGRIIYCLFEHCFYQRPGKAEDEQLNVFGFPPLVAPIKCTVFPLVKIEKFEVVAKKISKALTAAGISHIIDMTGNTIGKRYARTDEIGVPLAITVDNTTSVTVRDRDSKDQIRVEVDEVASVVKEVTDGQSTWADIMWRYPAHTASAAEEEEASET

SEQ ID NO: 51287 - protein, 195 aa, Saccharum officinarum
IGSTGYGLGGSSMALFGRVGGGIYTKAADVGADLVGKVERNIPEDDPRNPAVIADSVGDNVGDIAGMGSDLFGSYAESSRAALVVASISSFGIDHEFTPMLYPLLISSVGIIACLITTLFATDFFEIKAVDEIEPALKKQLIISTAVMTVGIALVSWLGLPYTFTIYNFGVQKTVYNWQLFLCVAVGLWAGLGSY

SEQ ID NO: 51288 - protein, 379 aa, Triticum aestivum
MARPRLRLLLVAAAVLLLLHPALSSAAEGLEDPLIEQVVGGDAENELELNAEAHFASFVRRFGKSYRDADEHAHRLSVFRDNLRRARRHQRLDPSAVHGITKFSDLTPDEFRERFLGLRKSRRSFLKGISGSAHDAPALPTDGLPTEFDWREHGAVGPVKDQGSCGSCWSFSTSGALEGANYLATGKLEVLSEQQLVDCDHQCDPSEPRACDAGCNGGLMTTAFSYLAKAGGLETEKDYPYTGRNSACKFDKSKIAAQVKNFSTVAIDEDQIAANLVKHGPLAIGINAVFMQTYIGGVSCPYICGRHLDHGVLLVGYGSAGYAPLRFKEKPYWIIKNSWGENWGESGYYKICRGPHVKNKCGVDSMVSTVTAIHTSKKE

SEQ ID NO: 51289 - protein, 159 aa, Prunus avium
SKTLAEKAAWEFAKEKGLDVVVVNPGFVMGDVISPRLNASMVTLVRLLEGCIETYENIFMGSVHFKDVALAHILLHENKSATGRHLCVEAISHYGDFVAKVAELYPEYKVPSLPKDTQPGLLREKNGAKKLMNLGLDFIPMDQIIKDAVESLKNKGFIS

SEQ ID NO: 51290 - protein, 234 aa, Staphylococcus lugdunensis
ILYNKDTDVVILPEMWNNGYALEQLEEKADFDLERSTDFIKNLALQYQVDIIAGSVSNKHHDHIFNTAFAIDKTGKVINQYDKMHLVPMLDEPAFLTAGKNVPETFKLSNGVKVTQMICYDLRFPELLRYPARSGATIAFYVAQWPSARLNHWQVLLKARAIENNMYVIGCNGCGYDGKTQYAGHSVAINPNGEIIQELSTTEKELTVTIDIDAVEQQRKAIPVFDSLVPHLYK

SEQ ID NO: 51291 - protein, 213 aa, Zea mays
  misc_feature (204)..(204): Xaa can be any naturally occurring amino acid
  unsure (1)..(213): unsure at all Xaa locations
AGSHRRPAAACFSLQWCLRAADGRTDGRRGSGMERYEVIKDIGSGNFGVAKLVRDVRTKELFAVKFIERGHKIDENVQREIMNHRSLRHPNIVRFKEVVLTPTHLAIVMEYAAGGELFERICGSGRFSENEARFFFQQLLSGVSYCHSMQICHRDLKLENTLLDGSEAPRLKICDFGYSKSSVLHSQPKSTVGTPAYIAPEVLXKGYDGKVAD

SEQ ID NO: 51292 - protein, 196 aa, Prunus avium
EFYAPWCGHCKSLAPTYEKVATAFKLEEGVVIANLDADKYKDLAEKYGVSGFPTLKFFPKNKEGEEYGGGRDLEDFVDFINEKSGTSRDGKGQLTSKAGVLANLNDLVKEFVKAGDDEKKTIFSKIEEEVGKLEGSAARYGKIYLKAAENSLKKGADYAKNEIQRLERILEKSVNPTKADEFTLKKNILYTFASSS

SEQ ID NO: 51293 - protein, 163 aa, Arabidopsis thaliana
  misc_feature (93)..(93): Xaa can be any naturally occurring amino acid
  unsure (1)..(163): unsure at all Xaa locations
EDSNELCLVDEKLGALCMQWLQDKVHSIREAAANNLKRLAEEFGPEWAMQHIVPQVLEMINNPHYLYRMTILRAVSLLAPVMGSEITCSKLLXAVITASKDRVPNIKFNVAKMMQSLIPIVDQAVVENMIRPCLVELSEDPDVDVRYFANQALQSIDNVMMSS

SEQ ID NO: 51294 - protein, 331 aa, Glycine max
NSYIVAMARFSLDEISDTGAFVRSASTFRNWISRDLNSQFPPESGRYHLYVSYACPWASRCLAYLNIKGLNKAISFSAVKPIFERTNESDDYKGWVFPESETEVPGAEPDMLNGAKTIRELYEIASANYTGKYTVPVLWDKKLKTIVNNESSEIIRMFNTEFNSIAENPTLDLYPTDLKPQIDDTNEWIYTSINNGVYKCGFAKKQEPYNEAARQLYGALDKCEDILSKQRYICGNTLTEADIRLFVTLIRFDEVYAVHFKCNKKLLREYPNLFNYTKDIFQIPGISSTVNMEHIKLHYYGSHPSINPFGIVPVGPNIDYSAPHDRERFSA

SEQ ID NO: 51295 - protein, 421 aa, Silicibacter pomeroyi DSS-3
MRRVVVTGLGLITPLASGVEETWSRLLEGQSGAGPITRFDAVASGVTTTYACEVPRGDGSDGTFNPDDWMAPKEQRKIEDFILYSIAAAEMACKDANWLPEDEEDRLRTGVLIGSGIGGLGSIAETANLIKEKGPRRVSPFFIPGALINLASGQVSIRHGFKGPNHSVVTACSTGAHAIGDASRIIRAGDADVMIAGGGEACICEIGIAGFNACKALSTKYADNPKAASRPYDADRDGFVMGEGAGIVVLEDYEHAKARGAKIYAEVLGYGMSGDAYHITAPSETGDGAERSMRAALRSAGLEPSDLDYINAHGTSTMADTIELGAVERLLGNHAANVTMSSTKSATGHLLGAAGAIEAIFSILAIRDQVAPPTINLDNPAVETPVDLAPNAKRARKIDVALSNSFGFGGTNASVIFGKAD

SEQ ID NO: 51296 - protein, 254 aa, Arabidopsis thaliana
MRPILMKGHERPLTFLRYNREGDLLFSCAKDHTPTLWFADNGERLGTYRGHNGAVWCCDVSRDSSRLITGSADQTAKLWDVKSGKELFTFKFNAPTRSVDFAVGDRLAVITTDHFVDRTAAIHVKRIAEDPEEQDAESVLVLHCPDGKKRINRAVWGPLNQTIVSGGEDKVIRIWDAETGKLLKQSDEEVGHKKDITSLCKAADDSHFLTGSLDKTAKLWDMRTLTLLKTYTTVVPVNAVSLSPLLNHVCTNAS

SEQ ID NO: 51297 - protein, 381 aa, Anabaena variabilis ATCC 29413
MATNHLLEIKNYGQSIWMDNLNRDIIQSGELKNLVENQGICGITSNPAIFEKAIADNVIYDADIEAGVRVGLPTYKIYESLIFADIRNACDILRPVYEASNKLDGYVSIEVPPTIAHDTQATINEARRYYQEIGRENVMIKIPGTEAGLPAVEQVIAEGINVNVTLLFSVQSYINTAWAYIRGLEKRLAEGKDISQIASVASFFLSRIDSNIDGKIDAKLARGIDDISLEAKLVAVKGKVAIANAKIAYQEYKKIIESDRWQALAAKGAKVQRLLWASTSTKDPNYSDVMYVDELIGPDTVNTLPPATITACADHCEVASRVETGVAEAYQLIESLKDPDINIDINAVMDELLIEGINKFVQPFQSLMNSLEGKVKLLSPV

SEQ ID NO: 51298 - protein, 460 aa, Iris hollandica
MGSVEHPHIALLAFPFGTHAAPLLSLAHSLAASAPPGTFFSFVSSRRSVSSLSLSVSPSDNIRFYEVSDGSPVLAPAAASGMLEDPEEEVRLFMKETPGNYRRALEAAVEGCAGTRVTCIIADAFLWFVGEIAAENGVGWVPLWTGGPCSFQAHLYTDLLRDRIGVGEKADLDADLQFIPGLASLRVRDLPEDIVTGHLDGAFATMLYRMATELPRSTSTIILNSFEGLHPEIDADLATKFRKPLPIGPLNLLFPSPAVPEPVSSSRCLAWLDKFEPDTVVYVSFGTVVDLPPSELAELALGLESSGSPFLWSIKDPAKAKLPAGFLDRTRDRGLLVPWIPQVAVLNHNAVAAFLSHCGWNSVLESMTCGVPMVCRPFLGDQMLNSKVVSQVWKVGVRLHNGPMTSTNVAEAIKTVVAGDEGKNMRDRAAKMREKATGSVRPDGSSVRNLNTLLEIVFAR

SEQ ID NO: 51299 - protein, 468 aa, Ralstonia solanacearum
MASTLAAPPADLTNERVAYARLFALGLQHVLVMYAGTVAVPLIVGSALHLPKEQLAFLINADLFAAGVATLIQSLGVWKFGIRMPVMMGVTFASVGPMIAIGGDPGIGLLGIYGAVIAAGLFGIVIAPLMGRVLGLFPPVVTGTVITLIGVSLMGVGINWAAGGQPTLQAMVDGVLRTVPNPAYGDPGGLAIALSVLVIILLLTKYGRGLIGNIAVLLGVACGTLIAMAAGKVSFAGVADADWMAVITPLHFGMPTFHAGAVASMCVVMLITLVESTGMFLALAEITGKTLTHDDLTRGLRADGLGSVIGGLFNTFPYTSFSQNVGLVTVTGVRSRFVAAAGGVILIALGLFPKMAHVVASVPAFVLGGAGIVMFGMVAATGVRILGSIDFNRHRHNLFIVAIAIGFGMIPTLAPAFFQYLPRWLEPVTHSGIVLGTLVAVILNLYYNGMQPAEHAMRAAAATTHSAE

SEQ ID NO: 51300 - protein, 225 aa, Lactobacillus gasseri
MVKHRHSLSKNQKWVIASTSSGFALENMDVLFLSFAMSSMIADLHLSGGAAGFISTITNLGMLVGGIAFGILGDKIGRVKTFSHTVIIFAIATALMAFANNIYMIYGLRFLAGIGAGGEYGVGIALIAENFHKEQIGKMTSVAAIGGQIGAILAALIAAWIIPTAGWHMLFLVGIIPVVLTIFIRKHVHESEQFLEAKASEKNSLLSDVAKKCSLRLVLLGKHSA

SEQ ID NO: 51301 - protein, 456 aa, Arabidopsis thaliana; identical to SEQ ID NO: 1196

SEQ ID NO: 51302 - protein, 357 aa, Kluyveromyces lactis NRRL Y-1140
MSEWKVDPDNRRRLLQLQKVGGNKKCLDCGAHNPQWASPKFGVFICLECAGIHRGLGVHISFVRSITMDQFKSDELVRMENGGNDKFTEYLEDHGIDSSLPQKLKYDNVIASDYKDKLTAICESKEWEEPDRSDFDPTQLTATNSRSGTPQLNGSLSEKLGSEEAVNQKEKNESYFATLGEKNLQKPEHIPPSQGGKYQGFGNTPIIQHKKGNQAEPGSTTLTLENFQKDPLGTFTKGWGLFSSAVSKSMEEVQESIIKPNVEQFSQKDLSEEAVRAAKQFGQKFQESSSYGLQALNSFTKGLQQQLQETQDGPATSSQYTKLFDGADATSTTHTQAPAQNKTSEKKISGEDGWEEF

SEQ ID NO: 51303 - protein, 544 aa, Thiobacillus denitrificans ATCC 25259
MVNQLIEPYGGTLVNLIDPEKREALKHEALSLPSLDLDWQQQCELEMLMTGAYSPLTGFMTRAQCARVESAQQLDDGSFWPSPITLTSRDRALADRRPGERLALRDGEGYMLAILTLSDVWKDGERWHLAGEVEGAALPPHPDFVSLRATPAELRALFVRRGWRRIIAWQARQPMHRAQYEFCLKSAIENEANLLLHPQVGGDITEAPAYFGLVRSFLAIRDRFPAATTQLSLLPAPPPEASGRALLLRAIVARNFGCSLLIAGGEHQPDGGDCRRGEDLTQNRVDPSVAERAEKIGVRLIAYPRMVYVEDRAEHLPEAEAPQGARLLTLSGEEFQRRMRAGLKIPEWYSFPEVLAELHRQTPPRERQGFTVFFTGLSGAGKSTLARALAARLMEMGGRCVTLLDGDIVRRHLSSELGFSKAHRDVNVRRIGFVASEITKNRGIAICAPIAPYRQTRRDVRAMIEAVGGFVEIHVATPIETCESRDRKGLYAKARAGLIPEFTGVSDPYEVPETPELAIDTTGLAIDEAVQQILLKLEHEGYLR

SEQ ID NO: 51304 - protein, 645 aa, Leptospira interrogans serovar Copenhageni str. Fiocruz L1-130
MKTATIPKIQSKTLYNVMKASAETFADSTAQYYKPDGKNYQANSFKNLYETVQQIGCGLISLGIEPGTPIGLIADSGARWLWCSMGITNIGCADVPRGTDSTSDDLRYILNHAECSITFLENETALKKVLSQKSEFPHLKKIILFDQKGTLEDTKSFEIILLNDLIEKGKTWIQNKGKDEFHKRGSAIREEDLATIVYTSGTTGKPKGVMLTHKNIVFNVDSALQGEDLNVYPTDRSMAYLPPWHIAERLVETVCIRAGGAEAFTSISSLSQDLADIKPTLLLSVPRVWESLYNKIHDKVRNSSPVQQALFGAFKEIAITYYKHLSRLQNLEYSLTEQSTFASLWQKLISFWIVILLWIPNQISQLAFNKIKQGLGGELKFALSGAGALPQYIDTFFNAIGIPILEGYGMTELSGISTRRILGEITVGTLGRCIPGVQIKLMDEKGNEITKPGIKGIAWHKGDHVMKGYYKEPEKTKEILSSDGWLNSGDLLTWTTSGELKYSGRAKDTIVLLGGENLEPEPIEFALVRSRFIQQAMVIGHDQKTLGALIVPDREILEKYLKESKSKMLNEIENLNGDLDIVALFKNEIKTFVSSENGFKNFEKVSNFRILNKKFEPGDELTQTMKIKRNVVTDKYKKEIEEMYQ

SEQ ID NO: 51305 - protein, 334 aa, Pseudomonas chlororaphis
MALSKEVPEFDIDDEVLLMETDIATDSMSNEGSAVPSVRAKSKHSASLKQHKYIDYTRALDATQLYLNEIGFSPLLSPEEEVHFARLSQSGDPAGRKRMIESNLRLVVKIARRYVNRGLSLLDLIEEGNLGLIRAVEKFDPERGFRFSTYATWWIRQTIERAIMNQTRTIRLPIHVVKELNVYLRAARELTQKLDHEPSPEEIANLLEKPVGEVKRMLGLNERVSSVDVSLGPDSDKTLLDTLTDDRPTDPCELLQDDDLSQSIDQWLSELTDKQREVVVRRFGLRGHESSTLEDVGLEIGLTRERVRQIQVEGLKRLREILEKNGLSSESLFQ

SEQ ID NO: 51306 - protein, 231 aa, Arabidopsis thaliana
MAAFPNLNSDAGLKKLDEHLLTRSYITGYQASKDDITVFAALAKPPTSQYVNASRWYNHIDALLRISGVSAEGSGVIVEGSAPITEEAVATPPAADSKDAAADEEDDDDVDLFGEETEEEKKAAEERAASVKASTKKKESGKSSVLIDIKPWDDETDMKKLEEAVKSIQMEGLFWGASKLVPVGYGIKKLQILCTIVDDLVSIDTMIEEQLTVEPINEYVQSCDIVAFNKI

SEQ ID NO: 51307 - protein, 382 aa, Escherichia coli O157:H7 EDL933
MFKSDAARTRQRLSARKGRTLPPGRGKFPHSTTESFRNTFWLKKIMEHCFNMVDQQTTTAQTNANFLQIRFTTMSKKIAVIGECMIELSEKGADVKRGFGGDTLNTSVYIARQVDPAALTVHYVTALGTDSFSQQMLDAWHGENVDTSLTQRMENRLPGLYYIETDSTGERTFYYWRNEAAAKFWLESDQSAAICEELANFDYLYLSGISLAILSPTSREKLLSLLRECRANGGKVIFDNNYRPRLWASKEETQQVYQQMLECTDIAFLTLDDEBALWGQQPVEDVIARTHNAGVKEVVVKRGADSCLVSIAGEGLVDVPAVKLPKEKVIDTTAAGDSFSAGYLAVRLTGGSAENAAKRGHLTASTVIQYRGAIIPREAMPA

SEQ ID NO: 51308 - protein, 270 aa, Tradescantia fluminensis
MGRSPCCEKAHTNKGAWTKEEDQRLIAYIKVHGEGCWRSLPKSAGLLRCGKSCRLRWINYLRPDLKRGNFTEEEDEVIIKLHALLGNKWSLIAGRLPGRTDNEIKNYWNTHIKRKLISRGIDPQTHRPVNSGAQFTISSANNQANSTKIPVNEALKQSTDSSSSQDMQSSNSVLDVVERCPDLNLDLSINIAYSTDRKPFSSSTEMQITPAATEATTPTSVSPYFQPICLCYRLGFSRTEACSCKAISNSNSQNVFRYYRPLKEEGHQTN

SEQ ID NO: 51309 - protein, 465 aa, Shewanella sp. MR-7
MTVLSVSRALSTSSLATSCAPNSRSLGVSPSKLTKSLLASIVTLSLMGAGGSAAYAAQPDAAKLAAGVEQKVIDWRRDLHQHPELSNREFRTSKIIEKHLKSLGLEVQTGIAHTGVVGILKGGKPGPLIAIRADMDALPVSEVVDVPFASKATDTYRGQTVGVMHACGHDTHVAMLMGVAENLVKVKDSLAGDVMFIFQPAEEGAPDGEEGGAELMLKQGLFAKRKPDQVFGMHVTSSMPSGMIGVRSGPAMASEDSFTIKVKGRQTHGSRPWNGVDPIVAAAQIITNVQTIVSRQVDITKAPAVVSFGAVNGGIRSNIIPDEVELIGTIRTFDQPMRADIKVRLAEIAELSAKTLGATATTEIHQGYPVVVNNPELVASMRPVLASVVGDKMLIEPGLITGAEDFSFYALESPGMFFFLGVTPKGTDPETAASNHSPAFYVDESALKVGVEAMTKVALTALKAQ

SEQ ID NO: 51310 - protein, 276 aa, Tradescantia fluminensis
MGRSPCCEKAHTNKGAWTKEEDQRLIAHIKAHGEGCWRSLPKAAGLLRCGKSCRLRWINYLRPDLKRGNFSEEEDELIIKLHAMLGNKWSLIAGQLPGRTDNEIKNYWNTHIKRKLVSRGIDPQTHRRMNNTEHCEVSSPQHDTKSVVLDETRKLQSTDQSSETSGVTIADNFEHQLPDLNLELTISLNNSSYHYSSSSKKSSTALQGVLKPSNSVVSASAEEAVREKSSCAQVICLCYQLGFQSAEGCNCKSISANYQQVFKYHNPLFKEEQQIN

SEQ ID NO: 51311 - protein, 387 aa, Ceriporiopsis subvermispora
MAFTSLLALVALAAITRAAPTTICPDGTRVSNHVCCDFIPLAQALQSTLYMGDCGEDAHETIRLTFHDAIAISQSQGPSAGGGADGSMLIFPTVEPFFHANAGIDDSVNNLIPFLDKFPTITAGDLIQFAGTVALSNCPGAPQLEFLAGRPNATAPAVDGLIPEPQDNVTHILERFADAGGFTPFEVVSLLASHTVARADKVDLTIDAAPFDSTPFTFDTQIFLEVLLKGVGFPGTDNNTGEVESPLPLGNNKQGGNDTGEMRLQSDFALARDDRTACFWQGFVNEQEYMMSSFKAAMSKLAILGHNRNDLIDCSEVVPTPKPPVGKPASFPATTGPQDLQLTCKSERFPSLTIDHGAQETLIPHCSNGGQDCPTVQFTGPAGEDDS

SEQ ID NO: 51312 - protein, 555 aa, Rubrivivax gelatinosus PM1
MTKFVFVTGGVVSSLGKGIASASLAAILESRGLKVTLIKLDPYLNVDPGTMSPFQHGEVFVTDDGAETDLDLGHYERFISTRMKRSNNFTTGQIYKSVLEKERRGDYLGKTVQVIPHVTNEIQEFVKRGANDVDVAIVEIGGTVGDIESLPFLEAVRQMALRAGPSNSAFVHLTYVPWIAAAGELKTKPTQHTVQKMREIGIQPDALLCRADREIPEDERDKISLFTNVGLQGVISMWDVDTIYKVPRMLHEQRLDELICMKLQLLTKSADLRRWDRLVHEVTHPQHEVTIAMCGKYTDLSDSYKSLNEALRHAGIHHHARVKIEYVDSELLNESNIDQLAGYDAILVPGGFGKRGVEGKILTARYAREHKIPYLGICLGMQVATIEVARHLAGLKDANSTEFEPATPHPVIALIDEWQDADGSVQKRDANSDLGGTMRLGAQSSDVKPGTLAHQIYGPVVTERHRHRYEANEHYLDRLQQAGLVISAITQREKLTEMVELPQSVHPWYVGVQFHPEFKSTPWAGHPLFISYVKAALAHQAERGTASGGLQKVAA

SEQ ID NO: 51313 - protein, 521 aa, Magnaporthe grisea 70-15
MPPPPNRFPTGPTTISPYQHQFPPHGQGHAGGHPPPLGNPAYINPNAQLNPFAANGALSLAAGLNAASGFGAHDASGLGSHAARLGFSQGATLQQHHQQQQQQHHPQQSHGVMVDHPTRNQTKGRIREVWKHNLHEEMAVLRDLIERYSYISMDTTFPGVVCRPMGSFRSKRDYHYQCLRANVDMLNVIQIGITLFNEDGENPPARPNSTDVAELLGAAGRRSAQQGPLPYTWQFNFQFSLKDDMYSQSQIESLLQAGIDFVALERDGINPKEFASLMISSGMVCDESISWISFHSAYDFGYLLKLLWCNMLPEDQDEFKQLLRLFFPNVYDVKYFMKHQMKPLNAIGFQGIDGAIVDALQKFDHKSTLETLAEVLKVKRTGPAHQAGSDSLLTGRAFFQMREKVFGGKLPEDILGQVWGLEDSEPGPSMSLASANAAAAANQGESGANGTQGHHLQHHQQQQQQNGPSTPNTVSASLVTTPGAVSHSHNTNGMGAAGMGPMTPGGGGGAFGHFAFSSHQR

SEQ ID NO: 51314 - protein, 337 aa, Rhodospirillum rubrum
MHTHDLSPWTHDHVYATGGEAAAERRTRLVVALTVAMMGLEIVVGTLTNSMALLADGFHMATHAAALGIAAFAYAHARRHAFDRRYSFGTGKVGALAAFTSAIILGVVALGMVWESASRFFSVQTIAFEQALIVATLGLVVNLLSVLILGGPGQAPHHDHGHDHGHGHGHDHGHGAHEDHNIRAAYLHVMADAVTSVLAIVALLFGKYMGWWWLDPLIGIVGAAVIGRWAWGLMMRSGAVLLDHSADKGLEDEVRMAIEGDGTAINRVADLHLWQVGPGHWAAIVSVVSDIVQPIAHYRALLAEVHELSHVTIEVQACAGCEGDCGCACGAATASAV

SEQ ID NO: 51315 - protein, 808 aa, Cryptococcus neoformans var. neoformans B-3501A
MSNYPHSAAIASSLSTSPYGKFPIPAPATSLTPRPAALQSNLENLISRSRTHPHPHRVAGEHSPPHHNNYAQQPSPSHPHPAEGSDDDLDKSTTGHTLAAHHAPGVGTIQEASLDEPLIFQDDEDSINTDRQRGERTSLLNHDWKRRVSRTARRSYGAASAPLGAYEGSRRVSSVDGLGAGNSRSRSKARTPPRRESEHGRKNRDGDVAQPHGVPAQYSSDEDSTSTHRGRFQGQRPLSYTSSPYSSPTSPFRSKTVRVADESSDEDEGGDLARGLLATSGTGVFAGSGRVGDAGLMDLDPVEELDAEDLELPVGEDGTEVRDRTKAIKAELPIILRSALPVFFTQAAEWSLVLASVVSIGHLGTTELAASSLASMTASVSCFSILQGLATALDTLLPAAWTSSDPSRVGLWTQRMFIVMGFSMIPMYLLWWNISPILVVLGQAKLEPEPEVSHSAGVYLRWLSIGIPGYGGNVLVKKYLQAQNLMHVPTYTLFFVAPLNLFMNWLLVWGPEPVRLGFPGGAFATAMSYNLAFVISSLWAVFCGPREAFHPIRFKYAFSKLGTVTSLGLAGTIMLSSEWWAWEACALAASLLGPTTLAAQSVLLSTASTFFQVPASLGIASAVRVGNLLGAGRDWEAKWASRTCLFLSVTFALVNSTICIIFRTNWGYLFNNDPEVVALVASVMPYIALFQIADGIAATSGSILRSLGLHTTGALINLTSYYIIGLPFGLWLAFTPTFSLGLIGLWLGLSVALGYASVLSAVLVWKANWVRAVERVRERLGLGVHGVVGIDGKWDVREQAIEERQELP

SEQ ID NO: 51316 - protein, 332 aa, Pennisetum glaucum
MQSLTDGVVVTSIRKKRPRRSRDGPTSVAAVIQRWAEHNKQLEHDSDGAKRPRKAPAKGSKKGCMKGKGGPENTHCGYRGVRQRTWGKWVAEIREPNRVNRLWLGTFPTAEDAARAYDEAARAMYGELARTNFPSQKAVASSQAARVPTPAQVAPAAVEGVVPSTSCESTTTSNHSDVASSSNKTEASDMSSSVKVECPEAVGAGSHRSEMVSGISHQHEDSHPSIQASTPNISDKEVFEPLEPIENLPEGDFDGFDIDEMLRMMEADPQNEGGAGAGAGAGGGMEQTFFFDGLDPNLLESMLQSEPEPYSLSEEQDMFLAGFESPGFFEGL

SEQ ID NO: 51317 - protein, 432 aa, Silicibacter sp. TM1040
MLHGAGRDQDAAKPDWHRHKAMEMTVDYTAQLDAAIERLHEEGRYRTFIDIERRRGQFPHAVWTRPDGSEQDITVWCGNDYLGMGQHPVVLKAMRDAIDATGAGSGGTRNISGTTVYHKELESELADLHGKEAALLFTSAYIANDATLSTLPKLLPGLIIYSDALNHASMIEGVRRNGGAKRVFRHNDVAHLRELLEADDPAAPKLIAFESVYSMDGDFGPIAEICDLADEFNALTYIDEVHAVGMYGPRGGGVTERDNLAHRIDIINGTLAKAYGVMGGYIAASAKMCDAIRSYAPGFIFTTSLAPSIAAGAAASVRHLKTAQDLRDKHQEQARYLKTRLKMMGLPVIDHGSHIVPVIVGDPVHTKKLSDMLLSDFGIYVQPINFPTVPRGTERLRFTPSPVHGPSEMDHLIRAMDKLWSHCALNRAELAG

SEQ ID NO: 51318 - protein, 376 aa, uncultured archaeon GZfos36D8
MAGVRDISKAKRIVIKVGTSNLTDKSYRLDPRKVEKLAKEIIELKNKGKEVIVVTSGAIGAGIGKLDLKQRPRDIKVLQATAAVGQNILMSTYDKYFAKYDQTIAQLLLTHDNFFNRQRYLNLRNTLITLLKSGVIPIINENDTVAVDEIKLGDNDNLSALVASSLGADLLIILTDIDGLYTYDPKRSEKAEFISVVEDITPEIERIASGRGKTGVGGMKTKVQAAEVTMKAGIPMIIANGGEKNILSRVIAGEPVGTLFMPKKKRMNDKEHWILFSASPKGKIKVDEGAKTALVEGGGSLLPSGITDVEDEFMRGDPVSIIDSRSVEFARGITNYSSAEIKKIKGVQSKEIEQILGRKDYGYGEVVVYRGNLVLL

SEQ ID NO: 51319 - protein, 561 aa, Agrobacterium tumefaciens str. C58
MNAHTRQDTSMTASVTSALTPNKDWWRGAVIYQIYPRSYQDSNGDGIGDLKGITDRLHHIAGLGADAIWISPFFTSPMKDFGYDVSNYVDVDPMFGTLADFDGLIAEAHRLGIRVMIDLVLSHTSDQHPWFVESRASRNNPKSDWYVWSEAKPDGTPPNNWLSIFGGSGWQWDPTRMQYYMHNFLTSQPDLNLHNPEVQEELLNITRFWLKRGVDGFRLDTINFYFHDLELRDNPALAPERRNASTAPAVNPYNFQEHLYDKNRPENIAFLKRFRAVLDEFPDIAAVGEVGDSQRGLEIVGEYTSGDDKMQMCYAFEFLAPDALTPQRVADVQADFARAAPEGWACWAFSNHDVVRHVSRWGEHVEDKDAFAKLLSALLMTQRGSVCIYEGEELGLTEADIAFEDLQDPYGIQFWPEFKGRDGCRTPMVWDAGHAQAGFSTSDKIWLPIPAEHKQRAVSAQQGNEASVLEHYRRFLAFRKQHPAFAKGGIEFQPLEGDVLSYTRKLGNETILCLFNLSATPANATLPKGNWEVLEGHGFASGLEGTSVELPAWGAFFARYA

SEQ ID NO: 51320 - protein, 452 aa, Aralia cordata
MGSSAEPHVGVLAFPFATHAGLLLGLVRRLAAAAPNVNFSFYSTAASNRSLFSYPNSPYSNVIPYDVSDGVPEGYVFSGKPQEDINLFLTVASDEFKRGLEKAAVDSGRKITCLVADAFLWFSGDLAEQIRVPWVPLWTSGACSLSIHVYTDLIRQTVGLGGIEGRMDEILTFIPGFSELRLGDLPGGVLFGNLESPFSIMLHKMGQTLPRAAAVPINSFEELDPDLMKDIKSKFKKILNVGPFNLTSPPPSSNSDEHGCIPWLDNQNPKSVAYIAFGTVATPPPNELVSLAEALEESGTPFLWSLKDNFKNHLPKGFLERNSKSGKIVAWAPQIQVLSHDAVGVVITHGGWNSVVESIAAGVPVICRPFFGDHHINTWMVENVWKIGVRIEGGVFTRTGTMNALEQVLLSQEKGKKLKEQITVFKELALKAVGPNGSSTQNFKRLLEVITT

SEQ ID NO: 51321 - protein, 249 aa, Thermoanaerobacter tengcongensis MB4
MYKVVLLRHGESIWNMENRFTGWTDVDLSPKGIEEAKQAGKILKEKGFTFDAAFTSVLKRAIRTLWIVLDELDLMWIPVYKSWRLNERHYGALQGLNKAETAKKYGEEQVKLWRRSAEVRPPALTKDDPRYPGNDPRYADLSEDEIPLTENLIDTINRVIPYWESTIAPTIKSGKRVIIAAHGNSLRGLVKYLDNLSNEEIMELNIPTGIPLVYELDENLKPIRHYYLADEEELKKKQQEVAEQGKARA

SEQ ID NO: 51322 - protein, 328 aa, Salmonella enterica subsp. enterica serovar Paratyphi A str.
MTKTNLITGFLGSGKTTSILHLLAHKDPAEKWAVLVNEFGEVGIDGALLADSGALLKEIPGGCMCCVNGLPMQVGLNTLLRQGKPDRLLIEPTGLGHPKQILDLLTAPVYEPWIDLRATLCILDPRLLLDQQSVANENFRDQLASADIIIANKTDRATAQSDAALQQWWRQYDGDRQLIHAEHGQIDGKLLDLPRQNLAELPASAAHSHTHASKKGLAALNLPAQQRWRRSLNSGQGHQACGWIFDADTVFDTIGLLEWARLAPVGRVKGVMRIQEGLVRINRQGDDLHIETQSVAPPDSRVELISNTETDWNTLQTALLKLRLATHA

SEQ ID NO: 51323 - protein, 324 aa, Salmonella typhimurium LT2
MKPSIILYKTLPDDLLHRLEAHFTVTQVPNLHPETVAQHAQAFASAQGLLGASETVNRALLEKMPALRAASTISVGYDNVEVDALTARKIVLMHTPAVLTETVADTVMALMLATARRVVDVAERVKAGEWTESIGPAWFGVDVHHKTLGIVGMGRIGMALAQRAHFGFTMPVLYHARRRHQEAEDRFNARYCDLDTLLQEADFVCVILPLTAETRHLFGATQFARMKSSAIFINAGRGPVVDENALIAALQNGEIYAAGLDVFEQEPLSVDSPLLNMSNVVAVPHIGSATHETRYNMMACAVDNLIDALQGKIEKNCVNPQAAG

SEQ ID NO: 51324 - protein, 472 aa, Oryza sativa
MAFFRGLTAVSRIRSRMAQEATTLGGVRWLQMQSPSDLDLKSQLQELIPEQQDRLKKLKSEHGKVQLGNITVDMVLGGMRGMIGMLWETSLLDPDEGIRFRGLSIPECQKVLPTAVKDGEPLPEGLLWLLLTGKVPTKEQVDALSKELASRSSVPGHVYEAIDALPVTAHPMTQFTTGVMALQVESEFQKAYDKGMSKSKFWEPTYEDCLNLIARLPAVASYVYRRIFKGGKTIAADNALDYAANFSHMLGFDDPKMLELMRLYITIHTDHEGGNVSAHTGHLVGSALSDPYLSFAAALNGLAGPLHGLANQEVLLWIKSVIGETGSDVTTDQLKEYVWKTLKSGKVVPGFGHGVLRKTDPRYTCQREFALKYLPEDPLFQLVSKLYEVVPPILTELGKVKNPWPNVDAHSGVLLNHFGLSEARYYTVLFGVSRSIGIGSQLIWDRALGLPLERPKSVTMEWLENHCKKAAA

SEQ ID NO: 51325 - protein, 202 aa, Zea mays
  misc_feature (43)..(43): Xaa can be any naturally occurring amino acid
  unsure (1)..(202): unsure at all Xaa locations
HEAPVLGKDATIEQLVPIFLSLLKDEFPDVRLNIISKLDQVNXGVGFFDDKLGALCVQWLEDKVFSIRDAAANNLKRLAEEFGPEWAMQHIIPQVLEKINNPHYLYRMTILQAISLLAPVMGAEITCQKLLPVVINSSKDRVPNIKFNVAKVLQSLVPILDQSVVEKTVKPCLVELSEDPDVDVRYYANQALQGCAQMMVSS

SEQ ID NO: 51326 - protein, 439 aa, Saccharomyces cerevisiae
MVTKHQIEEDHLDGATTDPEVKRVKLENNVEEIQPEQAETNKQEGTDKENKGKFEKETERIGGSEVVTDVEKGIVKFEFDGVEYTFKERPSVVEENEGKIEFRVVNNDNTKENMMVLTGLKNIFQKQLPKMPKEYIARLVYDRSHLSMAVIRKPLTVVGGITYRPFDKREFAEIVFCAISSTEQVRDYGAHLMNHLKDYVRNTSNIKYFLTYADNYAIGYFKKQGFTKEITLDKSIWMGYIKDYEGGTLMQCSMLPRIRYLDAGKILLLQEAALRRKIRTISKSHIVRPGLEQFKDLNNIKPIDPMTIPGLKEAGWTPEMDALAQRPKRGPHDAAIQNILTELQNHAAAWPFLQPVNKEEVPDYYDFIKEPMDLSTMEIKLESNKYQKMEDFIYDARLVFNNCRMYNGENTSYYKYANRLEKFFNNKVKEIPEYSHLID

SEQ ID NO: 51327 - protein, 130 aa, Arabidopsis thaliana
  misc_feature (3)..(4): Xaa can be any naturally occurring amino acid
  misc_feature (11)..(11): Xaa can be any naturally occurring amino acid
  misc_feature (17)..(17): Xaa can be any naturally occurring amino acid
  misc_feature (34)..(34): Xaa can be any naturally occurring amino acid
  misc_feature (52)..(52): Xaa can be any naturally occurring amino acid
  misc_feature (75)..(75): Xaa can be any naturally occurring amino acid
  unsure (1)..(130): unsure at all Xaa locations
KLXXDLLVENXKETGWXTPIHVDAASGGFIAPFXYPELEWDFRLPLVKSINXSGHKYGLVYAGIGWVIWRNKEDXPEELIFHINYLGADQPTFTLNFSKGSKASQLNTQLYPQFGATEGPGNFGDFQGGF

SEQ ID NO: 51328 - protein, 589 aa, Anabaena variabilis ATCC 29413
MQLRDSVRRTKIVATIGPATSSPEMLKAIIEAGATTLRLNFSHGSHADHQRSIRLIRQTAFELNQPVAILQDLQGPKIRLGKFENGSIVLAKGDRFTLTNRPVVGTQEISCVTYDYLADEVPVGAKILLDDGRVEMVVEDINRDKGDLHCRVTVAGKLSNNKGVNFPGVYLSIKAMTDKDREDLMFGLDQGVDWVALSFVRNPQDIIEIKELISSTGKQVPVVAKIEKHEAIEQMEAVLALCDGVMVARGDLGVELPAEDVPVLQKRLIATANRLGIPIITATQMLDSMVSNPRPTRAEVSDVANAILDGTDAVMLSNETAVGSYPVEAVATMARIAERIEQEEAMASKLRQMRDNRRSIPNAISQAVGQIAEQLGAAAIMTLTQTGATARNVSKFRPQTPILAVTPHVNVARQLQMVWGVKPLLVLELPSTGQTFQAAINVAQEHSLLFEGDLVVMTAGTLQGVSGSTDLIKVEVVTAVLGQGIGLGQGLVSGCARVAHTGMDVGNFNSGDILVAPRTGADFVEAIRKAGGIITEDESLTSHAAVIGLRLGVPVIVGVKKATQVIRDGAILTLDLQRGLVYSGAVGTP

SEQ ID NO: 51329 - protein, 522 aa, Thiobacillus denitrificans ATCC 25259
MKLLRLARIIRTGLRFGLEEFFLGHERVRPLRWLVRITLFWRPLREPRAVRLRRALESLGPIFVKFGQLLSTRPDLVPADIVEELSRLQDRVPPFPSVQAIATIEAAYRTPLSSAFAEFDATPVASASVAQVHFARLHDGTEVAVKVLRPGIAPVIAHDVSLMYLAAALVEKLFADGKRLRPREVVSEFEKHLADELDLMREASNCSQLRRNFRDSPLLAVPEVYWDYCSADVMVMDRMDGIPVSQIERLREAGVDFGRLAATGVEIFFTQVFRDGFFHADMHPGNILVRPARDLAGSPAAGEVARVDQYVALDFGIMGTLTEIDKQYLARNFLAFFRRDYRGVALAHLESGWVPPDTRVDELEAAVRAVCEPVFDRPLKDISFGRVLLQLFQASRRFNVEIQPQLALLQKTLLNIEGLGRQLDPDLDLWKTAKPFLERWMNEQIGWRALLKSLEAEAPKWATLLPQLPRLAHAALADNRLALVEADLVLMLRQQQTRNTWLGAIAVLLTVLSGLVLYSILQ

SEQ ID NO: 51330 - protein, 238 aa, Synechococcus elongatus PCC 6301
MGANLATKLREGTKKAHTMAENVGFVKCFLKGVVEKNSYRKLVANLYFVYSAMEEELERHRDNDKIAGIYFPVLNRKTSLERDLAFYYGEDWRQQIQPSKAAQSYVARIREVSNTAPELLVGHAYTRYLGDLSGGQILKTIAQRGMNLDGAGTAFYEFEAIEDEKAFKQTYRQAMDTLPVDEATADRIVEEANDAFGMNMAMFQELEGNLVAAIGKMFFNSLTRRFVRGSTELATAAE

SEQ ID NO: 51331 - protein, 343 aa, Mycobacterium avium subsp. paratuberculosis K-10
MANPSGETLPMFYDDDADLTIIQGRKVGVIGYGSQGHAHSLSLRDSGVQVKVGLKEGSKSRAKVSEQGLDVDTPAAVAKWADVIMLLAPDTAQADIFKNDIEPNLSDGDALFFGHGLNIHFGLIKPPAEVTVAMVAPKGPGHLVRRQFVDGKGVPCLIAVDQDPTGKGEALALSYAKAIGGTRAGVIKTTFKDETETDLFGEQAVLCGGTEELVKAGFDVMVEAGYPPEMAYFEVLHELKLIVDLMYEGGIARMNYSVSDTAEFGGYLSGPRVIDAGTKDRMREILRDIQNGDFVKKLVANVEGGNKQLEQLRKENAEHPIEVVGKRLRDLMSWVDRPITETA

SEQ ID NO: 51332 - protein, 491 aa, Ralstonia solanacearum
MYLGIDLGTSEVKVLLLAPDGTVVGTAGAPFTVSRPHPRWAEQHPEDWWQGTLAALGMLRARCPDAFARVRGIGLSGQMHGAVLLDQADRVLRPAILWNDMRSDDECALLTERAPDLHAIAGNLAMPGFTAPKLLWVARHEPDVFAATTCVLLPKDYLRFRLTGAKVSDPSDAAGTLWLDVARRDWSDALLAACDLSRDQMPRLVEGNAPSGTLRADLARELGLDPRVVVAGGGGDNAASALGIGATHAGDGFVSLGTSGVLSIVSDRFTPNPALATHAFCHAIPERWQLMTVVLSAASCLRWICTLTGTDEPTLLAEVERLDPGACAQAPLFLPYLSGERTPHNDPYAQGVFFGMTHATERAHLGYAVLEGVTLGFADGFDALRGIETDALSLIGGGARSQYWAQMIADALNVRTRQHGGGETGAALGAARLGWLAVGGDPDTVLAKPPVCAEYAPNAARHAALCERLVAFRELYRHVQPLYEPSRPRLA

SEQ ID NO: 51333 - protein, 409 aa, Acinetobacter sp. ADP1
MKRVVITGMGINSCIGNTLEDVTHSLQNGISGTRFNPTYAELNFKSHVSAAAEQNFDNIDRKLKRFMGVCAMYAYNSAVAAVEHAGLTAADLEGNPRYGIVGGSGGGSTASVVEMQELLETKGARKVGPFFVPRNMTNTITANVGVAFKLQGVSHSIASACATSADAIGYAYNLIQLGKQDLILAGGGEEDHWSQSLLFDAMGALCSKYNDTPETASRPYSKDRDGFVIAGGGGFLVLESLEHAQARGANILAEIVAYAANADGADMVAPSGEGATRCILMALEEAKQHGVDSLDYVNTHGTSTPAGDITELKAMERAFGEGKVPAFSSTKSMTGHSLGAAGVHEAIYSVLMLQNEFIAPNINVTELDEGAKGFDIVLEKRDTKLNAVMSNSFGFGGVNACLIFKKWDQ

SEQ ID NO: 51334 - protein, 209 aa, Oryza sativa
  misc_feature (3)..(3): Xaa can be any naturally occurring amino acid
  unsure (1)..(209): unsure at all Xaa locations
KKXSLKLQKRLAASVLKCGRGKVWLDPNEVNEISMANSRQNIRKLVKDGFIIRKPTKIHSRSRARRMKEAKRKGRHSGYGKRKGTREARLPTKILWMRRMRVLRRLLRKYREAKKIDKHMYHDMYMKVKGNMFKNKRVLMESIHKSKAEKAREKTLSDQFEAKRAKSKASRERKIARREERLAQGPREPAAPAAAAPAQTAAAPKKAKK

SEQ ID NO: 51335 - protein, 532 aa, Oceanobacillus iheyensis HTE831
MAKKDESMNKSNLENDMSLTNRQGHPVTNNQNIRTVSNRGPATLENYDFIEKISHFDREKVPERIVHARGAGAHGYFETYGTVGNDPVSKYTRAKVFQDKGKQTPVFVRFSTVVHGNHSPETVRDPRGFAVKFYTEDGNWDLVGNNLKIFFIRDAMKFPDMIHAFRPDPVTNIQDSERFFDFCANSPESFHMVTFVYSPWGIPANYRMMQGSGVNTYKWVNKDGEAVLVKYHWEPKQGIKNLTTKEAEEIQATNFNHATQDLYDAIENGDYPEWELFVQIMSDDEHPELDFDPLDDTKLWPEDQFPWHPVGKMVLNKNPENYFTEVEQAAFGTGVLVDGLDFSDDKMLQGRTFSYSDTQRYRVGANYLQVPVNESKKRVATNHEGGQMRQKNDKAPSQNPHINYEPSVLGGLEENEQTGKEYTPHIEGNLVRESIDRNDNTKQAGHTFREFEEWEKAELISNLVGDLSVSDQRIQDKMIALAEEADDEYGRRLREGLEQAKKMGTPHNPLGAKDAEQAPKKAIDKGHDADPY

SEQ ID NO: 51336 - protein, 472 aa, Yarrowia lipolytica CLIB122
MADCIKVMPTPTGMAMAGRHNQRLQGTCNPHMPVAKDLFPEYGTLATGENEPSRNIRRAQKLREFQNLELPPYLAKQVAAKMAEKGLAVEATGGVAVQRIAGGSQSGQKALMGASSSALTKHTPSASQPTTHDSLTNLGANLTQSKPAWHAPWEIYRVITGHQGWVRSVCVEPENQWFATGSADKTIKIWDLATGKLRLTLTGHIMGVRALGVSPRHPYMFSGGEDKMVKCWDLETNKVVRHYHGHLSAVYSLDIHPTLDVLVSAGRDAVARVWDIRTRDPVVVLSGHKSTINRVKFQASEPQVITASADETVRLWNLQAGKTMTTLTHHKKSVRGLTLHPEEFTFSTASANSSKQWKCPEGDLVLNYDDQNAIINTLSVNQDNVMFSGGDNGSIGFYDWKTGHMFQSTQSIPIPGSIESENGIFDSSFDKTGLRLITCEADKSIKMWREKPNATAESDPGLEWKPKIYQTY

SEQ ID NO: 51337 - protein, 153 aa, Zea mays
KRSEAMSMSKTGQAAEKDEQQQSRGIALMQGICAVVYRKADNTPCPIKQGLYLGSVGAAFNKDALKSLNITHILIVAKSLDPVFPAEFNYKKIEVLDIPDTDLLKHSDECFGFIDEAISSGGNVLVHCFAGRSRSGAGMENATCAALIIILVL

SEQ ID NO: 51338 - protein, 268 aa, Tradescantia fluminensis
MGRSPCCEKAHTNKGAWTKEEDQRLIAYIKVHGEGCWRSLPKAAGLLRCGKSCRLRWINYLRPDLKRGNFTEEEDELIIKLHALLGNKWSLIAGRLPGRTDNEIKNYWNTHIKRKLISRGIDPQTHRPINAGSQFTISSANHQGSLKNIRDNEALKQSPNSSSQDMQSNSSVIDVVERCPDLNLDIAINIAYSTDQKPFSSSTEVQKAPAVTQATTPTSVSPYFQPICLCYNLGFSKSEACSCRASSNDNQHVLRYYRPLIEEGHQTN

SEQ ID NO: 51339 - protein, 63 aa, Aureococcus anophagefferens
MRGILVDWLVEVHLKFKMLQPTIYLTVQIIDRYLSAKQIDRNQLQLLGVAALFIASKYEEIYP

SEQ ID NO: 51340 - protein, 312 aa, Streptococcus pneumoniae
MAEIYLAGGCFWGLEEYFSRISGVLETSGGYANGQVETTNYQLLEETDHAEAVRVICDEKGVSLREILLYYFRVIDPLSINQQGNDRGRQYRTGIYYQDEADLPAIYTVVQEQERMLGRKIAVEVEQLRHYILAEDYHQDYLRKNPSGYCHIDVTDADKPLIDAANYEKPSQEVLKASLSEESYRVTQEAATEAPFTNAYDQTFEEGIYVDITTGEPLFFAKDKFASGCGWPSFSRPISKELIHYYKDLSHGMERIEVRSRSGSAHLGHVFTDGPRELGGLRYCINSASLRFVAKDEMEKAGYGYLLPYLNK

SEQ ID NO: 51341 - protein, 436 aa, Polaromonas sp. JS666
MNAPDSPNALAARSELTDLMQRMGSGAKVASAHMARASAAVKNWALSKLATLLRQNVKALDNANQRDLARAQAAGLAGPLLDRLRLSPKDIETVALGCEQLAAMPDVIGEIIGMKEQPSGIRVGQMRVPIGVFGMIYESRPNVTIEAASLAIKSGNACILRGGSEAIESNKALASLVQQALLDAGLPADAVQLVPTTDREAVGLLIAMPQYVDVIIPRGGKGLIERISREAKVPVIKHLDGNCHVYVDDPCDIDMAVRVADNAKTQKYSPCNASEGLLVARGVAAGFLPKIGAVYAAKGVEMRCDAEARALLAGVAGANLQPVSEQDWYEEYLAPIISIKVVAGIDEAIAHINQYSSHHTDAILTRDHMHAQRFLREVDSASVMVNASTRFADGFEFGLGAEIGISTDKFHARGPVGIEGLTSLKYVVLGNGEVRT

SEQ ID NO: 51342 - protein, 63 aa, Alexandrium tamarense
MRGILADWLVEVAEEYKLCADTLYLSVNYIDRFLSIHPVQRSNLQLVGIACMWIASKYEEIYP

SEQ ID NO: 51343 - protein, 232 aa, Agrobacterium tumefaciens str. C58
MSETIHVFDTAAALATALAAEVAKRLDAATKERGTASIAVSGGSTPKLFFQALSRHDLDWPNISVTLVDERFVPPESDRSNHRLVADNLLQDKAKAAYFVPLFQPAASPEDAATLATVKTEAICDPFDVVILGMGTDGHTASFFPGGDNLYEALDLDEPRGVLTMAAENAGEERLTFNFSSLHDADFLVLHIEGAAKKATLEKAQSGEDEDEMPVRAVLNRAETPVDIYWAP

SEQ ID NO: 51344 - protein, 64 aa, Isochrysis galbana
MRGILADWLIEVHHKFKLHIETLYGSVDLIDRYLSKCAPITRSKLQLVGVAAMFIASKYEEIYP

SEQ ID NO: 51345 - protein, 63 aa, Prorocentrum minimum
MRGILTDWLVEVAEEYKLCADTLYLSVNYIDRFLSIHPVQRSNLQLVGIACMWIASKYEEIYP

SEQ ID NO: 51346 - protein, 642 aa, Neurospora crassa
MKRFSQRVLSRTKDKDSKSKKNKDAKDGTASPNSQGSREATQSPVLTPSSSTSTLVNDSRNKPLPPNNAAHGDHGNSMLGPQGGNSNPGAADRFSSIGGQQQGANGGSTPVRHGTLPPTVIISPSAPHVPPPGAAETMPHDLAPPKAGQKSLMFDRLHQTPKDVLEGLRTPKRQNSSRFDISAHRELEKLPGFHEVAPNHRQDLFMKKIEQCNVIFDFNDASADMKSKEIKRLALHELLDYVANNRQVITEPMYPRVVEMFAKNLFRPIPPPMNPQGEAFDPEEDEPVLEVAWPHIQVVYEFFLRFIESQDFNTNIAKAYIDHSFVLQLLELFDSEDPRERDFLKTTLHRIYGKFLNLRSFIRRSINNVFFQFTYETERFNGIAELLEILGSIINGFALPLKEEHKLFLTRVLLPLHKVVLGLLRYWPKVNSTKEVMFLNEVEDIFEVMDPAEFAKVQEPLFHQLAKSVASPHFQVAERALYFWNNEYFCNLVSDNVEIILPIMFAPLYENSKGHWNRTIHGMVYNAMKLFMEINPQLFDDCSHEYTENQSNAPAREAHRQSKWARLEELAKQRKVESGTSNGTSSIPARTTVHPLPRLEEVDGTEDNQKRLDSLKLQDGDRRERRPGMHERQSSVGSSRSR

SEQ ID NO: 51347 - protein, 63 aa, Prorocentrum minimum
MRGILVDWLVEVAEEYKLCADTLYLSVNYIDRFLSIHPVQRSNLQLVGIACMWIASKYEEIYP

SEQ ID NO: 51348 - protein, 470 aa, Yersinia pestis KIM
MKKTKIVCTIGPKTESEEMLTNLLNAGMNVMRLNFSHGDYAEHGQRIKNLRAVMAKTGKKAAILLDTKGPEIRTMKLEGGKDAALVAGQTFTFTTDQSVVGNDKIVAVTYPGFAADLKIGNTVLVDDGLIGMEVIEVTEHTVVCKVLNSGDLGENKGVNLPGVSIQLPALAEKDKGDLIFGCEQGVDFVAASFIRKRSDVLEIREHLKAHGGEHIQIISKIENQEGLNNFDEILEASDGIMVARGDLGVEIPVEEVIFAQKMMIEKCNRARKVVITATQMLDSMIKNPRPTRAEAGDVANAILDGTDAVMLSGESAKGKYPLESVTIMATICERTDRVMPSRIESLNDNRKMRITEAVCRGAVETAEKLEAKVIVVATGGGKSAKSVRKYFPTATILALTTNEMTAHQLILTKGVITQLVDEIASTDDFYRLGKEAALASGLAQKGDVVIMVSGALVPSGTTNTSSVHVL

SEQ ID NO: 51349 - protein, 956 aa, Solanum tuberosum
ASIDAQLRQLVPAKVSEDDKLVEYDALLLDRFLDILQDLHGEDLKETVQECYELSAEYEAKHDPKKLEELGNVLTSLDPGDSIVIAKAFSHMLNLANLAEEVQIAYRRRQKLKKKGDFGDESNATTESDIEETFKKLVGDLKKSPQEVFDAIKNQTVDLVLTAHPTQSVRRSLLQKHGRIRDCLAQLYAKDITPDDKQELDEALQREIQAAFRTDEIRRTPPTPQDEMRAGMSYFHETIWKGVPKFLRRVDTALKNIGINERVPYNAPLIQFSSWMGGDRDGNPRVTPEVTRDVCLLARMMAANLYYSQIEDLMFELSMWRCNEELRVRADDLQRSSRRDEKHYIEFWKQVPPNEPYRVILGDVRDKLYQTRERARQLLGHGYSEIPEEATYTNIEQFLEPLELCYRSLCACGDLSIADGSLLDFLRQVSTFGLSLVRLDIRQESDRHTDVLDAITQHLEIGSYRDWSEERRQEWLLSELSGKRPLFGPDLPKTEEIADVLDTFHVIAELPADCFGAYIISMATAPSDVLAVELLQRECRVRQPLRVVPLFEKLADLDAAPAAVARLFSIEWYRNRINGKQEVMIGYSDSGKDAGRLSAAWQLYKAQEELIQVAKEFDVKLTMFHGRGGTVGRGGGPAHLAILSQPPETIHGSLRVTVQGEVIEQSFGEEHLCFRTLQRFTAATLEHGMHPPVSPKPEWRALMDEIAVVATEKYRSIVFKEPRFVEYFRLATPELEYGRMNIGSRPSKRKPSGGIESLRAIPWIFAWTQTRFHLPVWLGFGAAFKYAIEKDIKNLRMLQEMYNAWPFFRVTIDLVEMVFAKGDPGIAALFDKLLVSEDLWSFGELLRSKYEETKSLLLQIAGHKDLLEGDPYLKQRLRLRDSYITTLNVCQAYTLKRIRDPDYSVTPRPHISKEYMEAKPATELVNLNPTSEYAPGLEDTLILTMKGIAAGMQNTG

SEQ ID NO: 51350 - protein, 638 aa, Crocosphaera watsonii WH 8501
MTTIPEYTNLTALSEVWAIAAKKFPDIVALHDPNSKPAVKLTYAELYQKLQQFAAGLQALGVSPDDKISLIADNSPRWFIADQGSMLAGAANAVRSAQADKNELAYIVRDSDSSTLIVENQKTLDKIRSFCDEIPLQLIILLSDETPNRDDPIKTLNFSQLMELGAKNSLQPVKKNDTDLATLIYTSGTTGQPKGAMLSHGNLLHQVKNLDAVIQPKVGDQVLSILPSWHSYERSAEYFLLSQGCTLVYTNIRNFKTDIKRFKPQHMVGVPRLWDSIYEGIQKQLREKSDTQQKIAQFFFNISQNFILSRRIADNMSLEHFDASAIDRFIAKLKTIFLAPLHGLGDKLVYSKIREGLGGNFETLMSGGGSLAKHLDDFYEIINVPVLVGYGLTETSPVSNARTHSHNLRGSSGQPIPHTEIKIVDLDTGEAVSRGKRGVVLIRGPQVMQGYYKKPEATAKAIDPEGWFNSGDLGWITPMNDLVITGRAKDTIVLNNGENIEPQPIEDACVRSPYIDQMMLVGQDQKALGALIVPNLDALQTWGKNQQLNLTFPSEDASRETIINSDLYGKPVQDLFKQELKREVKNRPGYRADDQIKVFELILEPFSSENGMMTQTLKIKRPIVTERYQGMINGMFES

SEQ ID NO: 51351 - protein, 457 aa, Yersinia pestis KIM
MQKYIVEARSLLALAIPVVIAQLSQTAMGVVDTIMAGSVSATDMAAVAVGTSIWLPAILFGHGLLLALTPTVAQLNGSGRRSQIAHQVRQGFWLALCVSVLIMLVLYNSDHVIKQMDNIDPVLAQKAVGFLHAIMWGVPGYLFFQVLRNQCEGLSKTKPGMVIGFVGLLVNIPINYIFIYGKFGAPALGGVGCGVATASVYWVMFLMMRWYVTRARSQQDIKLEKGFAAPDWQVMKRLSGLGLPVALALFFEVTLFAVVALLVSPLGIVAVAGHQIALNFSSLMFMLPMSLSVAATIRVGFRLGQGAVEQAQVAAYTSMAVGLLLASVTAVFTIVFREHIALLYNKTPEVVTMASHLMLLAALYQLSDAVQVIGSGVLRGYKDTRSIFFITFTAYWLLGLPSGYLLGLTDYILPAMGPAGFWIGFIIGLTAAAILMVLRIRWLQKQPTAFILQRAAH

SEQ ID NO: 51352 - protein, 288 aa, Triticum aestivum
MRAAALGIVAMACLVAVARGGNFIQDSEMTWGDGRGKVVDGGRGLDLTLDKTSGSGFQSKSEYLFGKIDMQIKLVPGNSAGTVTTFYLSSQGTAHDEIDFEFLGNVTGEPYTLHTNVFAQGQGQREQQFRLWFDPTKAFHTYSIIWNPQHVIFAVDGTAIRDFKNHEARGVSFPKSQPMRLYASLWNADDWATQGGRVKTDWSKAPFVASFRNFNADACVMSGGAQRCPAGTMEASAAGANGSGSWWNQELSGMGYRRMRWVQRKFMIYNYCTDPKRVAQACRRVQLR

SEQ ID NO: 51353 - protein, 386 aa, Neurospora crassa
MTRDQSSPIPITIITGFLGSGKTTLILNLLPQLRAANPSYRLALLKNEFGDLAVDSQLASSSAIAGVSELLNGCICCNLVGQLSVALSELQSTVRPDRIVIETSGSAFPATLALEVNRLARETGGQYVLDGVVSVIDVENWKGYEDTSYTARIQARYTDLIVFNKWEGAGERRFDEVLDRVGDLEVDTAWVKSDKGWVDMSVVFGIDGGLARGLTEEDGHVHDDKCGHDDKHKHDHQTEVEVLSIELKSGNREATVDATKLLAFLRKTNKDEVYRIKAVLAVSAKTAREVLKNSDEDTKVPVPPTSAGSEAQTTRYILNWAFGRWTFTPVAAEVKEHESSSEAILRMTMILARYESTKWKKRLEAGGLLELEEENGKGELSVTKVN

SEQ ID NO: 51354 - protein, 509 aa, Arabidopsis thaliana
MEISERVRARLAVLSGHLSEGKQDSPAIERWCTSADTSVAPLGSLKGTLTIVDERTGKNYKVPVSDDGTVKAVDFKKIVTGKEDKGLKLYDPGYLNTAPVRSSISYIDGDEGILRYRGYPIEEMAENSTFLEVAYLLMYGNLPSESQLSDWEFAVSQHSAVPQGVLDIIQSMPHDAHPMGVLVSAMSALSIFHPDANPALRGQDIYDSKQVRDKQIIRIIGKAPTIAAAAYLRMAGRPPVLPSGNLPYADNFLYMLDSLGNRSYKPNPRLARVLDILFILHAEHEMNCSTAAARHLASSGVDVYTAVAGAVGALYGPLHGGANEAVLKMLSEIGTVENIPEFIEGVKNRKRKMSGFGHRVYKNYDPRAKVIKNLADEVFSIVGKDPLIEVAVALEKAALSDDYFVKRKLYPNVDFYSGLIYRAMGFPPEFFTVLFAIPRMAGYLSHWKESLDDPDTKIMRPQQVYTGVWLRHYTPVRERIVTDDSKESDKLGQVATSNASRRRLAGSSV

SEQ ID NO: 51355 - protein, 326 aa, Oryza sativa
MAATGDSSGALVCVTGGSGFIGSWLVRLLLDRGYTVHATVKNLQDDGETRHLQALDGADTRLRLFQMDLLDPASITPAVDGAHGVFHLASPLTLHPTQDPEGELLKPAVSGTLNVLRAAKDCGVARVMLMASQVAIVPNPEWPADKVIDDDSWADVELLKKHQHWYNVSKTLAEKAAWDFAAKEGLQLVALNPGLVLGPMLMPSPTSSLHMLLQILGGQRFDIDDFYIGCVDVRDVAQSAVVIYENTSAQGRHLCIESIERLIDFHDKLAELYPEFPIHRIQEDKQGWVVRSKAASKKLIDLGVHFIPFEKTIRDSVDCLRSKGYI

SEQ ID NO: 51356 - protein, 147 aa, Glycine max
LVYICLQSSEEEGEDGEKRKKKKKEKKGLKEKIEEKIEGDHHHHKDEDTSVPVEKVEVVETAHAEEKKGFLDKIKEKLPGHKKTEEATATTPPPPPPVASLEHGEGAHHEGEAKEKKGILEKIKEKLPGYHSKTEEEKEKEKESGAH

SEQ ID NO: 51357 - protein, 554 aa, Shewanella sp. MR-4
MCSIFSILDIQSDAKELRQVALEMSKLMRHRGPDWSGIYASDKAILAHERLAIVDIEHGAQPLLTEDGSLILAVNGEIYNHKELKAQLGDKYSYQTNSDCEVILALYQEYGTEFLDKLNGIFAFVLYDKAKDAYLIGRDHMGIIPLYTGRDAAGNFYVASEMKALMPVCKTVAEFQPGQYLYSSIGEPVQYYTRDWQSFDAVKDNGASQEELRDALEAAVKRQLMSDVPYGVLLSGGLDSSVISAITQTFAKRRIEDDDQSGAWWPQLHSFAVGLKGAPDLAAAKKVADAIGTIHHEINFTFQEGLDAIKEVIYHLETYDVTTIRAATPMYLMARKIKAMGIKMVLSGEGADELFGGYLYFHKAPNAQAFHEELVRKLDKLHLFDCLRANKAMAAWGLEARVPFLDKEFMDVAMRINPEAKMSKDGRIEKHILRQAFEHKLPKEVAWRQKEQFSDGVGYSWIDGLKAHAAEQVDDLQLANAKFRFPYNTPETKEAYFYRCFFEEHYPLASAAETVPGGKSVACSTPEALAWDESLRGIIDPSGRAVRSVHAASY

SEQ ID NO: 51358 - protein, 646 aa, Arabidopsis thaliana
MISLTPSLFLNKTVVPGCSTRLSLRQPRTIITPPASLRVFSSLGSNQDPTGSVLIETTATSSSSLETSAADIVPKSTVSGGVQDVYGEDAATEDMPITPWSLSVASGYTLLRDPHHNKGLAFSHRERDAHYLRGLLPPTVISQDLQVKKIMHTLRQYQVPLQKYMAMMDLQETNERLFYKLLIDHVEELLPVIYTPTVGEACQKYGSIFLRPQGLFISLKEKGKIHEVLRNWPEKNIQVIVVTDGERILGLGDLGCQGMGIPVGKLSLYTALGGVRPSACLPVTIDVGTNNEKLLNDEFYIGLRQRRATGEEYSELMHEFMTAVKQNYGEKVVIQFEDFANHNAFDLLAKYGTTHLVFNDDIQGTASVVLAGLIAALRFVGGSLSDHRFLFLGAGEAGTGIAELIALEISKKSHIPLEEARKNIWLVDSKGLIVSSRKESIQHFKKPWAHDHEPIRELVDAVKAIKPTVLIGTSGVGQTFTQDVVETMAKLNEKPIILSLSNPTSQSECTAEEAYTWSQGRAIFASGSPFAPVEYEGKTFVPGQANNAYIFPGFGLGLIMSGTIRVHDDMLLAASEALAEELMEEHYEKGMIYPPFRNIRKISARIAAKVAAKAYELGLATRLPQPKELEQCAESSMYSPSYRSYR

SEQ ID NO: 51359 - protein, 266 aa, Arabidopsis thaliana
MAKSQIWFGFALLALLLVSAVADDVVVLTDDSFEKEVGKDKGALVEFYAPWCGHCKKLAPEYEKLGASFKKAKSVLIAKVDCDEQKSVCTKYGVSGYPTIQWFPKGSLEPQKYEGPRNAEALAEYVNKEGGTNVKLAAVPQNVVVLTPDNFDEIVLDQNKDVLVEFYAPWCGHCKSLAPTYEKVATVFKQEEGVVIANLDADAHKALGEKYGVSGFPTLKFFPKDNKAGHDYDGGRDLDDFVSFINEKSGTSRDSKGQLTSKVRLV

SEQ ID NO: 51360 - protein, 675 aa, Salmonella typhimurium LT2
MKLAAFALTLIPGIAIASSWTSPGFPTFSTQETGRFTSHAALTKGTRALTLHIDQQCWQPSGAIKLNQMLSLKPCEGAPPQWRLFKDGDYTITVDTRSGTPTLLLSIKTEPERTAQLAYQCPVWDGSPLTLDVRQTFPEGTVVRDYYSGQTDTVQNGQITLQPADSHGLLLLERAETHAPAPFNWRNATVYFVLTDRFRNGDPTNDHSYSRHKDGMQEIGTFHGGDLRGLTSQLDYLQQLGVNALWISSPFEQIHGWVGGGTKGDFPHYAYHGYYTQDWTTLDANMGSEADLRALVDGAHQRGIRILFDVVMNHAGYATLADMQEYQFGALYLSGAERQKILGDRWTNWRPAAGQSWHSFNDYINFSDSAAWEKWWGKKWIRTDIGDYDSPGFDDLTLSLAFLPDIKTESTTPSGLPAFYANKPDTKAKFIEGYTPRDYLTHWLSQWVHDYGIDGFRVDTAKNVELPAWQQLKTQASAALREWKQANPDKALDNSPFWMTGEAWGHGVMKSDYYRYGFDAMINFDYQEQAAKAVDCLAEMGPVWQQMTDKMQDFNVLSYLSSHDTRLFREGGDKAAELLLLSPGAVQIFYGDESARPFGPTGSDPLQGTRSDMNWQDVSGKSAAAVAHWQRISQFRARHPAIGAGQQTTLTLKHGYGFVRQYGDDTVMVVWAGRR

SEQ ID NO: 51361 - protein, 421 aa, Anabaena variabilis ATCC 29413
MTVAALDDCPEPMKSAKRAFQASLKLGTTKGIDRSRAVLAMAQALENAFDDILEANTLDLEASREMAVPELILDWLKLTPTRLEITVEILQRLGEISDPLRRVRNADYQPEDSQSYSQLMPLGVIGFIYEAFPDLGAIAAGLCIKTGNSIILKGSTEASHSNAAIVEALQHAIVEVGLPSGCIELVTTEHGGSLRDLITQDQYINLVIPYGRSSLVQQVVRQATCPVLKSAMGNCYLYWSLNSSLDMVRWMILDSHESEPDPVNAIEKVLIHRQAMPSSLAVLWNSLKEKGFEIKGDGELVEAFPQLQLAKDNEWGNAYLTKTVAFKLVDSLDGAIAWINQYSSGHADSIATESYQESRQFALGVNSASTYINTSPRFSRNPSRGDSVFLGMSNQKGHRRGFISLETLTTLKHIIQGNGRF

SEQ ID NO: 51362 - protein, 398 aa, Synechococcus elongatus PCC 6301
MTAAYFTHSTEYEAVSSDVANLSETPSSEAVETAVSSRQSTDLIRLYLQDIGRVRLLGRDEEVSEARWVQRYMQLLAVRNCVAVEEGGVLKDYVDLQEGRDRLTAQLGHRPSFEAWAKIVDCSLTELRQALQLGLHRWAEVCQLDLEELKQVCKEGQRAKDHMIKANLRLVVSVAKKYQNRGLELLDLVQEGTLGLERAVEKFDPTKGYRFSTYAYWWIRQGITRAIATQSRTIRLPVHVTEKLNRIKKAQRKIAQTKGRTANLEEIAQELEMTPDQVREVLLRVPKSISLETRVGKEKDTELGDLLETTDFTPEERLTQESLSNDLQRLLLELNHRERDVIRMRFGLRDGQIYSLAEIGQVLDLSRERVRQIEAKALQKLRHPRRRNQIRDYLELLH

SEQ ID NO: 51363 - protein, 446 aa, Corynebacterium diphtheriae NCTC 13129
MARSVVVWFRDDLRVHDNPALMKAWELVRANPADLHAVYIANEVGVRPLGGAVKWWLHHSLLALSEQLAQRGVRLHVLSGDPLTLLPQLVTSCGATAVTMNRRYDPAARSIDDAFVADASAHDVEVYDFPCHLLAEPGEITTTTGGSYKVFTPFSRNLRDAIGDLPLDTLAAPPKAEQPIDDTETQAAIADLGWDAWWAASISKAWTPGEPAAREALAELDDILPRYLDDRDRPDIDGTSRLSPRLRFGELSVAEVWNHAHTSEGFRRQLMWRDFAWHRLDAHPDMATANIRPEFDHFPWDGGDFEAELNAWRHGRTGIALVDAGMRELWATGTMHNRVRMVAASLLVKNLGIHWRHGEQWFWDTLVDADPASNPFNWQWVAGSGDDAAPYFRIFNPDTQARRFDPDGTYRTRWLPIMSADYPEEAIVDLKESRLRALDAYNACKR

SEQ ID NO: 51364 - protein, 236 aa, Pseudomonas aeruginosa UCBPP-PA14
MIESNLRLVVKIARRYVNRGLSLLDLIEEGNLGLIRAVEKFDPERGFRFSTYATWWIRQTIERAIMNQTRTIRLPIHVVKELNVYLRAARELTHKLDHEPSPEEIANLLEKPVAEVKRMLGLNERVTSVDVSLGPDSDKTLLDTLTDDRPTDPCELLQDDDLSESIDQWLTELTDKQREVVIRRFGLRGHESSTLEEVGQEIGLTRERVRQIQVEALKRLREILEKNGLSSDALFQ

SEQ ID NO: 51365 - protein, 213 aa, Zea mays
ARQYPCFGFAAKMPNIEWWRTCVKNSFVKAGYDYDEETFEKVFRRIYSAFGSSAPYSAFPDSQPFLRWAREKGLTVGIVSNAEYRYKDVILPALGLNQGSEWDFGVFSGVVGVEKPDPRIYKIALEMAGNVAPEEALHIGDSMRKDYTPARSIGMHALLLDRFKTADAESWRQSGATVLPDLVATQEWLTKDQNEEQEETVAARVLKRMSEKL

SEQ ID NO: 51366 - protein, 252 aa, Corynebacterium diphtheriae NCTC 13129
MTQKNFPPLPGTLSSTGQAIDPVAVSGLNSKLNWLRAGILGANDGIVSISALLLGVIATNASTSTVLLSGVAATIAGAVSMALGEFVSVSAQRDNEHKVMEQEYNELLHAPGEERAEIAGILENYGMSTATAYRAAIEIGRNDPFRAHLQIEYGIDPHDLTSPLHAAVSSAASFLLGALLPLLTVFLIPDLSRVAGAIAVTAVTLLALAITGYVSAHIGGTSPVKSVLRLTIGGILGLALTFGAGYAFGAVA

SEQ ID NO: 51367 - protein, 409 aa, Rhodopseudomonas palustris
MDYTKFFADALDRLHAERRYRVFADLERVAGRFPHATWHSPSGERDVVIWCSNDYLGMGQHPKVVGAMVETATRLGTGAGGTRNIAGTHHPLVMLERELADLHGKEAALLFTSGYVSNQTGISTLAKLIPNCLILSDALNHNSMIEGIRQSGCERIVWRHNDTAHLEELLRAVEPGRPVLIAFESLYSMDGDVAPMAKICDLAEKYGAMTYCDEVHAVGMYGARGAGVAERDGVMHRIDIIEATLAKAFGCLGGYISGKKDVIDAVRSYAPGFIFTTALPPPICAAATAAIRHLKTSTWERERHQDRAARLKAVLNTAGLPVMPTDTHIVPVFVGDAERCKKASDLLLEKHGIYIQPINYPTVAKGKERLRITPSPYHDDDLMDRLAEALVDVWETLELPLGAKPLAAE

SEQ ID NO: 51368 - protein, 217 aa, Candida albicans
MSKITSSGVREYVHKLLEYSTETKKRNFLETVELQVGLKNYDPQRDKRFSGTLKLPQVPRPNMTTCIFGDAFDFDRAKSLGVDAMSVDDLKKLNKNKKLIKKLAKKYNAFIASEVLIKQIPRLLGRTLSKAGQFPTPVSHNDDLYSKVTDVKSTIKFQLKKVLCLAVAVGNVDMEEDVLVNQIMMAANFLVSLLKKNWQNVGSLVIKSTMGPSFRIY

SEQ ID NO: 51369 - protein, 58 aa, Skeletonema costatum
MRGILADWLVEVHLKFKLVPETLYLVVNLIDRYLAKKEVTRSKLQLVGVTALFIATKY

SEQ ID NO: 51370 - protein, 769 aa, Rhodospirillum rubrum
MPRIGPRRELKTALEAYWSGQSDAKALLETAAALRVANWARQHAQGVSVIPSNDFSLYDHVLDTSVMVGAIPRAYGWTGGPVPLDTYFAMARGSQGAACAHGAAEDTHGVPALEMTKWFDTNYHYMVPEFTKDQTFTLASRKPVEEFNEAKALGYKTRPVLLGPVTFLKLGKSKDLSLNPLSLLDSLLPVYGDILRQLHEAGAEWVQIDEPCLVLDLDEPTREALRQTYCRFADALPGLKIMLTSYFGGLGDNLETALTLPVAGLHLDLVRAPDQLDAVIAKAPRRLVLSLGVINGRNVWRAPLSGIVTWLEPVLARIGAERIELAPSCSLLHVPIDLELETDLAPDLKDWLAFSVQKMAELAVLGQALARGRACVSDQLAASDLAAKRRATSTSVHDKAVAARLAAITPESAKRSHAFAQRAPAQRAALGLPPFPTTTIGSFPQTAAVRQARSAHAKGTLSDADYEAFLRQETEAAIRWQEDIGLDVLVHGEFERNDMVQYFGERLAGFAFTRHGWVQSYGSRYVRPPILFGDVSRPQPMTVSWWRYAQSLTAKPVKGMVTGPVTILTWSFVRDDVPRAVACRQIALAIGDEVRDLEAAGAQMIQIDEAALREGLPLRKAEWGAYLDWAIGCFRLCASGLADVTQIHTHMCYSEFNDIIAAIGAMDADVISIETSRSKMELLDAFRLYKYPNEIGPGVYDIHSPRVPEVGEMVDLLRLARQRLADDQIWVNPDCGLKTRHWDEVRPALVNMVAAARALRAVLLTGEDQ

SEQ ID NO: 51371 - protein, 328 aa, Escherichia coli O157:H7 EDL933
MERSMKPSVILYKALPDDLLQRLQEHFTVHQVANLSPQTVEQNAAIFAEAEGLLGSNENVDAALLEKMPKLRATSTISVGYDNFDVDALTARKILLMHTPTVLTETVADTLMALVLSTARRVVEVAERVKAGEWTASIGPDWYGTDVHHKTLGIVGMGRIGMALAQRAHFGFNMPILYNARRHHKEAEERFNARYCDLDTLLQESDFVCLILPLTDETHHLFGAEQFAKMKSSAIFINAGRGPVVDENALIAALQKGEIHAAGLDVFEQEPLSVDSPLLSMANVVAVPHIGSATHETRYGMAACAVDNLIDALQGKVEKNCVNPHVAD

SEQ ID NO: 51372 - protein, 387 aa, Staphylococcus epidermidis ATCC 12228
MQYYQPLLLTPGPTPVPEQILSAVQLPMVGHRSTDFEEIASEAFKGLKPVFGSKNEVLILTSSGTSVLEASMLNIANPDDHIVIIVSGAFGNRFKQIAQTYYNHVHVYDVNWGEAVIVDDFITYLKQLNVPVTAVFTQFCETSTGVIHPVHQLGHALKAFDNSLYFIVDGVSCIGAVDVDLTKDKIDVLVSGSQKAIMLPPGLAFVAYSDRAKKRFADVKTPRFYLDLNKYIKSQEQNSTPFTPNVGLFRGINAYVELVKKEGLNHVISRHFKIRNALRAALKALELELLVKDDAHASPTVTSFVPKNQEELNIIKNQLKSQFNITIAGGQGHLKGQILRIGHMGKISPFDILAVVSALEIILTSNRNVNYIGTGITQFMEVIRHES

SEQ ID NO: 51373 - protein, 210 aa, Sporobolus stapfianus
MSYAYLFKYIIIGDTGVGKSCLLLQFTDKRFQPVHDLTIGVEFGARMITIDNKPIKLQIWDTAGQESFRSITRSYYRGAAGALLVYDITRRETFNHLASWLEDARQHANANMTVMLIGNKCDLSHRRAVSYEEGEQFAKEHGLVFMEASAKTAQNVEEAFIKTAGTIYKKIQDGIFDVSNESNGIKVGYVVPNSSGGAAGSSSQGGGCCS

SEQ ID NO: 51374 - protein, 137 aa, Shigella flexneri 2a str. 301
MANKPSAEELKKNLSEMQFYVTQNHGTEPPFTGRLLHNKRDGVYHCLICDAPLFHSETKYDSGCGWPSFYEPVSEESIRYIKDLSHGMQRIEIRCGNCDAHLGHVFPDGPQPTGERYCVNSASLRFTDGENGEEING

SEQ ID NO: 51375 - protein, 627 aa, Thermoanaerobacter tengcongensis MB4
MSGDRKVDSKMPPIPHMGRGGGPRALVRGAEKAKDFKGTMKKFIKYLSEYKISIITVILLAILSTSFSIAGPKILSKAITKIFEGVMNRITGQGSGIDFEYIGRIILILIGLYGLSALFGYLQGWIMSGVAMKVTYKFRREISEKINRLPLKYFEGTNQGEILSRITNDVDTITQTLNQSLTQIITSVTTVIGVLIMMLTINWLMTLVALLIIPLSSLVIAFIVKYSQKYFREQQDYLGHVNGHVEEMYGGHHIVKAFNGEKKSIAKFDELNSTWYDAAWKSQFLTGVMMPLMNVIGNLGYVAVTVLGSWLVIKNAIEVGDIQAFIQYIRSFTQPIAQIANISNILQQTAACAERVFEFLEEEEEVPDNPKPIKLEDIKGDVEFRNVKFGYRPDKIVINNFSAKIKAGQKVAIVGPTGAGKTTIVKLLMRFYDVNEGAILIDGHDIREFSREDLRSLFGMVLQDTWLYNGTIMDNIRYGRLDATDEEVIKAAKAAHVHSFVKSLPGGYNMMINEESTNISQGQKQLITIARAILKDPKILILDEATSSVDTLTEIQIQKAMDYLMKGRTSFIIAHRLSTIKDADLILVMDHGDIVEQGTHEELLKKGGFYAKLYNSQFEREEEQLVS

SEQ ID NO: 51376 - protein, 879 aa, Oryza sativa
  misc_feature (515)..(515): Xaa can be any naturally occurring amino acid
  unsure (1)..(879): unsure at all Xaa locations
MDLAINPFSSGTRLRDMIRAIRACKTAAEERAVVRRECAAIRAAISEGDQDYRHRNMAKLMFIHMLGYPTHFGQMECLKLIAAAGFPEKRIGYLGLMLLLDERQEVLMLVTNSLKQDLNHSNQFIVGLALCALGNICSAEMARDLSPEVERLLQSREPNTKKKAALCSIRIVRKVPDLAENFMGSAVSLLKEKHHGVLISAVQLCAELCKASKEALEYLRKNCLDGLVRILRDVSNSSYAPEYDIAGITDPFLHIRVLKLMRILGQGDADCSEFVNDILAQVATKTESNKNAGNAILYECVETIMGIEATSGLRVLAINILGRFLSNRDNNIRYVALNMLMKAMEVDTQAVQRHRATILECVKDADVSIRKRALELVYLLVNDANAKSLTKELVDYLEVSDQDFKDDLTAKICSIVEKFSQDKLWYLDQMFKVLSLAGNYVKDDVWHALIVLISNASELQGYSVRSLYKALLACGEQESLVRVAVWCIGEYGEMLVNNVGMLDIEEPITLGFFVXPVQVTESDAVDAVEVSLKRYSADVTTRAMCLVSLLKLSSRFPPTSERIKEIVAQNKGNTVLELQQRSIEFNSIIQRHQSIKSSLLERMPVIDEASYLAKRAASTQATISSDKLAAAATPGSSLKLPNGVAKPPPAPLADLLDLSSDDAPATTSAPTTAPNDFLQDLLGIGLTDTSTAGGAPSASTDILMDLLSIGSSPVQNGPPTVSNFSLPGQAETKVAPVTPQVVDLLDGLSSSTSLSDENTAYPPITAFQSAALKITFNFKKQSGKPQETTIHASFTNLTSNTFTDFIFQAAVPKFIQLRLDPASSNTLPASGNDSVTQSLSVTNNQHGQKPLAMRIRITYKVNGEDRLEQGQINNFPAGL

SEQ ID NO: 51377 - protein, 358 aa, Shigella flexneri 2a str. 301
MKALARFGKAFGGYKMIHVPQPICGPEDVVTEIKAAAICGADMKHYNVDSGSDEFNSIRGHEFAGCIAQVGEKVKDWKVGQRVVSDNSGHVCGVCPACEQGDFLCCTEKVNLGLDNNTWGGGFSKYCLVPGEILKIHRHALWEIPDGVDYEDAAVLDPICNAYKSIAQQSKFLPGQDVVVIGTGPLGLFSVQMARIMGAVNIVVVGLQEDVAVRFPVAKELGATAVVNGSTEDVVARCQQICGKDNLGLVIECSGANIALKQAIEMLRPNGEVVRVGMGFKPLDFSINDITAWNKSIIGHMAYDSTSWRNAIRLLASGAIKVKPMITHRIGLSQWREGFDAMVDKTAIKVIMTYDFDE

SEQ ID NO: 51378 - protein, 102 aa, Zea mays
LMDACAHNPTGVNPTIEQWEQIKQVMRSKSLLTFFDSAYEGFASGSVDKDAQTARMIDADGGELLMAQSYAKNKGLHGERVVALSIVCKRGDVDCKSESQLK

SEQ ID NO: 51379 - protein, 319 aa, Oenococcus oeni PSU-1
MINFGIIGAGNIANRFADSLSHFKDANLYAVACRGIEKAAAFQRKHPCQLIYDDYDELLSNKDIDIVYIAVPHGFHYLWISKALKKGKAVLCEKPATLNAEQMKSVQKLAEAKNIFFMEAMKSRFTPAYQEIKTIINNGEIGKIISIDSSFCREISKKTATYHFQPIQGGCLLDIGIYNVALTEDFAKTLPKVEVLENKMDISGVESYTKAKLLFPNLSATIECAFDRNKQTEATIKGEKGQIEIKNFHRAESFIVKTSSGTKNYHIAYEQDDFHGEIAHVIQCYGKNKTESNNMPISDSVNCALIIEKIKNQIPELAV

SEQ ID NO: 51380 - protein, 412 aa, Shewanella sp. MR-4
MSKRRVVVTGLGLVTPVGNTVDTTWKALLSGKSGIAPITKFDASEFTTRFSGSVKDFDVEQYLTKKDARKMDLFIQYGMAAGIQAIQDSGLDMSKVNPGRVGTAIGAGMGGMWLIEQNHSALLSGGPRKISPFFVPSTIINMIAGHLSIMYGMTGPNFAVTTACTTGVHNIGFAARTIAYGDADVMIAGGAEDVTCPLGVGGFGAAKALSTRNDDPTAASRPWDKDRDGFVIGDGAGVMVMEEYEHAKARGATIYGELVGFGMSGDAFHMTSPPSDGAGAAAAMVNAVNDAKLPFEKIGYINAHGTSTPAGDKAEAAAVKSVFGDHAYNLLVSSTKSMTGHLLGAAGAVEAIFTLLALRDQAVPPTINLDNPDEGCDLDFVAHTARDVKLEYALCNSFGFGGTNGSLLFKKV

SEQ ID NO: 51381 - protein, 147 aa, Bordetella parapertussis 12822
MFKGLRLTGKYFFKRKVTLRYPMEKTPTSARFRGLHALRRYPNGEERCIACKLCEAVCPALAITIESEQRDDGTRRTTRYDIDLTKCIFCGFCEESCPVDSIVETHIHEYHGEKRGDLYFTKDMLLAVGDRYEAEIARRRAEDAPYR

SEQ ID NO: 51382 - protein, 235 aa, Yersinia pestis CO92
MKILIAEDNAHIRNGLMEVLAHEGYRPIAAENGVQALALYRQQQPDFIILDIMMPELDSYKVCREIRKHDWQTPIIFLSAKDEEIDRVIGLELGADDYISKPFGIHEMRARIKTIVRRCLRKVPESAEDAGFPFGDLMVFPNELCAIRGETRLELSLREVNILRYLYQHKGRVVTRDMLFDAVWGYDHLPQSRTLDQHISKLRKTIELDPVHPVLIRTVHGAGYRYQGTAQSLEK

SEQ ID NO: 51383 - protein, 318 aa, Ralstonia solanacearum
MAAIVVAGELLAEFVAAERGQMLAEPGAFIGPFPSGAPAIFADQAARQGASVAYAGCVGHDVFGDAIIARLERDGVDTAQIRRIERPTGTAFVAYRDDGSRSFVYNIAHSASGCFDASDVDTRLFEGCRYFHVMGSSLSSEGAIAAIRRGLMEAARVGAKISFDPNVRAEMLGFQPMRAALNDILAVCHLFLPSEADLPFFCGAQAPERAIEALLATYPLLERVVLKRGAAGSTAFDRGGSVAVPAYPVGEVDPTGAGDCFGGTLLAALVAGLPIDAALRRANAAGALAVMQRGPMEGNSHAADIDRFLAERGVACPA

SEQ ID NO: 51384 - protein, 256 aa, Ralstonia solanacearum
MQDKVAILTGAASGIGEAVAQRYLEAGARCVLVDLKPAGGTLAQLIETHPDRAFALSADVTKRDDIERIVSAAVERFGGIDILFNNAAAFDMRPLLDEAWEVFDRLFAVNVKGMFFLMQAVAQRMAAQGRGGKIINMASQAGRRGEALVSHYCATKAAVISYTQSAALALAPYKINVNGIAPGVVDTPMWEQVDALFARYENRPLGEKKRLVGEAVPLGRMGVPADLTGAALFLASTDADYITAQTLNVDGGNWMS

SEQ ID NO: 51385 - protein, 262 aa, Betula pendula
IAAGVQFGWALQLSPLTPYVQLLGIPHTWAPFIWLCGPISGLFVQPVVGYYSDRCTSRFGRRRPFIAAGSSLVAIAVFLIGYAADLGHVFGDPIDKTTKTRAIAVFVLGFWILDVANNMLQGPCRALLADLSGDDQRRMRTGNALYSFFMAVGNVLGFAAGSYTRLYKLFPFTSTEACDVYCANLKSCFFLSIALLLILTTIALTAVKEQILSPQPEPGTAGGEEKQVVPFFGEIFFALKGLQRPMRILLMVTCLNWIAWFP

SEQ ID NO: 51386 - protein, 628 aa, Anabaena variabilis ATCC 29413
MAAGLGLGVVGITKADIEGKTIWEALPPETSSEVELPYRQAFAGISSRFEAPYGHRVYEVHVLPVRNDDGEIFAGMTITQEITERKQSELALQDALQLLNLHIDTTPLAVVQWDCHLCVTRWSSTAEKIFGWRTEEVIGKYFQDLHMVYEEDMTAVAEASNRLLSGQESQIIQYNRNYTKDSRVIYCEWYNSSITNEAGSVTSVLSLVLDVTERIQAEKALRQSELMVIEERAQALERERAARIELERASRMKDEFLAIVSHELRSPLNGILGWSRLLRTRKLSPEKIEQALESIERNAQAQTQLIEDLLDISRIIRGNIRLLVRPTKLIPVIQAALDTVRPIANTKSIQIISRLNFDIGLVSADPERLQQVIWNLLSNAVKFTPEGGRVEICLEQVETNVQIRVTDTGKGISPEFLPYVFDRFRQADATTTRNQGGLGLGLAIVRNLVELHNGTVSVASPGEGQGATFTVQLPLLPSYSTVTPEEPLLQRQTTWDAKVQIRGLKILAVDDEPDTREFLKTALEQYGAIVTTAASTSEALKLLQLVKPDVLLSDIGMPNEDGYALIRQIRALSSEQGGNVPAAALTAYTRQSDRLLALTAGFQIHISKPIEPIQLLKIVATLAGNNSN

SEQ ID NO: 51387 - protein, 346 aa, Escherichia coli CFT073
MKSVVNDTDGIVRVAESVIPEIKHQDEVRVKIASSGLCGSDLPRIFKNGAHYYPITLGHEFSGYIDAVGSGVDDLHPGDAVACVPLLPCFTCPECLKGFYSQCAKYDFIGSRRDGGFAEYIVVKRNNVFALPADMPIEDGAFIEPITVGLHAFHLAQGCENKNVIIIGAGTIGLLAIQCAVALGAKSVTAIDISSEKLALAKSFGAMQTFNSREMSAPQIQGVLRDLRFNQLILETAGVPQTVELAVEIAGPHAQLALVGTLHQDLHLTSATFGKILRKELTVIGSWMNYSSPWPGQEWETASRLLTERKLSLEPLIAHRGSFESFAQAVRDIARNAMPGKVLLIP

SEQ ID NO: 51388 - protein, 515 aa, Pseudomonas aeruginosa UCBPP-PA14
MEARGLKITMLKLDPYINVDPGTMSPFQHGEVFVTQDGAETDLDLGHYERFVRTTMTQNNNFTTGRVYMDVLRKERRGDYLGATVQVIPHITDEIKRRIIKGAGDADVALVEIGGTVGDIESQPFLEAIRQLRVEIGAKRAMLMHLTLVPYIATAGETKTKPTQHSVKELRSIGLQPDVLVCRSDHPIDVSSRRKIALFTNVEERAVIALEDVDTIYRIPSVLHAQGLDDIVVERFGLECGQADLSEWDRVVDAKLNPEREVTIAMVGKYMELLDAYKSLIEAMTHAGIQSRTKVNLRYIDSEDIEQQGTSLLEGVDAILVPGGFGLRGVEGKISTVQYARENKIPYLGICLGMQVAVIEYARNVLGWSDANSTEFDKSSGHPVVGLITEWQDATGATEIRTEASDLGGTMRLGAQECQLQTGTLVHDCYAKDVIVERHRHRYEVNNNLLPQLEQAGLKISGRSGDGALVEVVEAPEHPWFVACQFHPEFTSTPRDGHPLFSGFVNAALKYSGKA

SEQ ID NO: 51389 - protein, 549 aa, Shewanella sp. ANA-3
MTLASIRRGYHVIKTLLQYGLDDVLPPKMTPWYFKLARNSLFWIRNKHKGKSGGERLKLAMQELGPVYIKLGQMLSTRRDLLSDEWANELAMLQDKVPPFDGALARQAIEAELKAPIESYFDDFDETPLASASISQVHTATLKSNGKAVVLKVLRPNVETKIQADLLLMSQTAKVIDYLLGEGNRLRPSEVIEDYRVTILGELNLKLEALNAIKLRNNFLDSDALYIPYVYEEFCYPRLMVMERIYGIPVSDIAALKAQGTNFKLLAERGVELFFTQVFRDNFFHADMHPGNIFISREHPENPYYIGLDCGIMGTLSEVDKRYLAENFLAFFNRDYHRIAQLYIESGWVSEKTDLQAFEQAIKVVCEPMFNKPLDEISFGHVLLELFRTARHFDIVVQPQLVLLEKTLLYIEGLGRQLYPQLDLWQTAKPFLEQWMAEQVGPKAMFKKVSTKLPYWSDKLPEFPELIYDNLKLGRKLLSSQQQMLDKYLKYQQQAHKSNYLLITSAILLICGTLLFNQDATLWSPYVCLISGAVLWIIGWRSRPKNRKF

SEQ ID NO: 51390 - protein, 343 aa, Thiobacillus denitrificans ATCC 25259
MSDPLESWHEEKRSAWLYRVVAECEQGTPRAALFGELAQAADDQAEIWLRVLAADGAPPPAPFRPDLRTRVVASLTRLFTPRAMHGVLAAMKVRGMSLYTQHAPHATPSKRDDIGKRHRTGAAGNALRAGVFGVNDGLVSNAALIYGVAGAAQASEVILLTGVAGLLAGAFSMAAGEYVSMRSQREMFEYQIGLERDELEKYPAEEAAELALIYAAKGMPEGEAKRVADTLMENPERALDTLAREELGLNPDELGSPWTAALASFAAFSVGAAVPLLPFLLGAGNSLALSVAFTALGLFAVGASMSLFTGRRAPLSGLRMLAIGGGAGLATYFIGAWLGVTLG

SEQ ID NO: 51391 - protein, 142 aa, Streptococcus thermophilus
MLNKIQQRNSDTYSMTPFDFFEDFSRNLFNDLRSNLIKTDIHETDNEYIVEAELPGISKDNIQVTYEDGVLTISGQQQIDTVDEDKKGKLIRSERSLTSVRRQYLLENVKEDEIKASYSDGILKVTLPKDSNKEIKKSIPIE

SEQ ID NO: 51392 - protein, 180 aa, Bacteroides thetaiotaomicron VPI-5482
MKSFILMVITMVCAISLEAQNKSFYDFNVTTIDGKEFPLSSLKGKKVLVVNVASKCGLTPQYAKLQELYDKYKDKNFVIIGFPANNFMGQEPGSNEEIAQFCSLKYDVTFPMMAKISVKGKNMSPLYQWLTEKKLNGKEDAPVQWNFQKFMIDENGNWVGFVAPKESPLSEKIVTWIEQE

SEQ ID NO: 51393 - protein, 518 aa, Zea mays
MAAITPPTQSEPSPQTGRPASSAAAAAKRGGGGAGAAGGPLMGKYELGRLLGHGTFAKVYHARHVDTGDNVAIKVLDKEKAVKSGLVPHIKREIAVLRRVRHPNIVHLFEVMATKTKIYFVMELVRGGELFSRVSKGRLREDTARRYFQQLVSAVGFCHARGVFHRDLKPENLLVDEQGNLKVSDFGLSAVAEQFRPDGLLHTFCGTPAYVAPEVLGRRGYDGAKADVWSCGVILFVLMAGYLPFHDKNIMAMYKKIYKGEFRCARWFSKDLTSLLMRILHTNPNTRITLPEIMESRWFKKGFKPVKFYIEDDQLHNVIDDEDGLLDMGPAGPVPPPLPPPPPPLPPPKVDGDESGSDSDSSISSCPASMLSDESQRPRGSLPRPASLNAFDIISFSRGFNLSGLFEEKGDEVRFISAEPMSDIITKLEDIAKLKSFKLRRKDWRICLEGTREGVKGPLTIGAEIFELTPPLVMVEVKKKAGDNEEYENFCDKELKPGMQHLVHHMVRAPSMLLTDAK

SEQ ID NO: 51394 - protein, 468 aa, Thiobacillus denitrificans ATCC 25259
MKKLFASFGLILALLAPGLAAAQDAAVPMDGAAAVETAPAAVAPAAAVPAETAATPVPDKGDTTWMMVSTLLVVLMIVPGVALFYGGLVRAKNMLSVLTQVMAIFCLISVLWAVYGYSLAFGDGGGMNWAIGDLSKLFLAGITPDSTAATFSDGVVIPEFTFVAFQLTFAAITVALIVGGLAERVKFSALLVFAVLWFTFSYLPIAHMVWATGGYLFEKGDLDFAGGTVVHINAGVAALVGAIVLGKRIGYGRDAMPPHNLPMTMIGASLLWVGWFGFNAGSNLEATGGAALAFINTILATAAAGLAWMFAEWMVRGKPSLLGVASGVVAGLVAITPAAGLVGPMGGIVLGAVAGVVCLWGVSGLKSALGYDDSLDVFGIHGIGGIIGAIGTGIFVSPTLGGVGVDGYTLAGQVMTQASGVLITIVWSAVVSFVAFKLIDVTLGLRVAEEQEREGLDTASHGERAYSV

SEQ ID NO: 51395 - protein, 187 aa, Escherichia coli K12
MMTTILTIHVPSTPGRAWNMLVALQAGNIVARYAKLHLYDAFAIQESRRVDAGNEIAPLLEVEGMKVGLMTCYDLRFPELALAQALQGAEILVLPAAWVRGPLKEHHWSTLLAARALDTTCYMVAAGECGNKNIGQSRIIDPFGVTIAAASEMPALIMAEVTPERVRQVRAQLPVLNNRRFAPPQLL

SEQ ID NO: 51396 - protein, 167 aa, Polaromonas sp. JS666
MMTRRNSLLKFGALSAGVAAALAGMRGLLAATPAHAARVYEVTHSDAEWQKLLRPDQYRVLRQAGTEPPYTSPLNKEKRAGVFTCAGCALPLFSSTTKFESGTGWPSFWQPMDKAVVEESDTTLFMKRVEVLCRRCGGHLGHVFDDGPKPTGLRYCINGLALNFKAA

SEQ ID NO: 51397 - protein, 242 aa, Polaromonas sp. JS666
MMMNKYLLTLGAVALAAWVFVGGGMGVSSAEEKAVKLPAPAMDMPATAQAGPQAGSATAVFAGGCFWGVQAVFQHTQGVLNAVSGYAGGEKATASYEMIGSGRTGHAESVQITYDPKKISYGKLLQIYFSVAHDPTTLNRQGPDSGTQYRSAVFYQDANQKKVTESYIAQLDAAKVFPNKIVTQLTPLNGFYPAEAYHQDYATLHPNQPYIARFDLPKIANLKTVMPEVYRDKPVLVSQAGK

SEQ ID NO: 51398 - protein, 452 aa, Rubrivivax gelatinosus PM1
MGDSLNAALLQRDHRHLVHSLHNEAAHLAGNVWVKGEGTTLTDADGKRYVDAMSGLWNVTLGYGRRELVDAAAAQMGELAYASGYAGSTNLRAMELAEKLAADRVYPNMHRFFFTSGGGESTDSTIKTARYYWKAQGKPGKFKTLSVMGGYHGVTLAAMCATGMPAYWPSFEPRMPGFVHIPNHDAYRYTVPPGGDPATAAADELERAILAEGPDTVALFIAEPVMGGGAYVPPAGYFRRIREICDRYDVLFATDEVITGFGRTGKLFALGHWGSDVQPDLVQFAKGITSGYVPMGGVGLSDKVAAVFDRPGADTWMHCYTYSGHPVACAVALATLDVIEREGLLARAQVLGDRLLRGLRGALGGHPNVGDIRGLGLIAAVELVEDRFSKKSFDPARKMGPQVLAQVRQRGVITRGRGDTIYLGPALVSDEATIDRIVEAVAEGVGALLPAA

SEQ ID NO: 51399 - protein, 438 aa, Bacillus anthracis str. A2012
MQRFKLKEDVTMEQKPVLDVNEVPKPGKWLFLSIQHLFAMFGSTVLVPFLTGLNPSVALISSGLGTLAFLLITKGQVPAYLGSSFAFIAPIITAKTAGGPGAAMLGGLLAGLVYILISLGIKKSGSKWIMKLLPPIVVGPVVMVIGLALAHTAVNMAMNGADGKYSFTHFSVALVTLAITIICSIFGRGFFSIIPVLLGIIGGYIFAYFQGLVDLKPVAEAKWFVVPDFTVPFVTYTPEFSWKIVLLMVPVALVTISEHIGHQIVLGNVIKRDLIEKPGLHRSIFGDGVATLIASLIGGPPNTTYGENIGVLAITRAYSVYLFIGSAVFAIMFGFIGKISALIHSIPTPVMGGVSILLFGVIASSGLRMMVDDKTDLSDKRNLMIASVILVIGIGGAVLHVGESFQVEGMALAAIVGVLLNLLLPETKQIKQSKQIAS

SEQ ID NO: 51400 - protein, 484 aa, Proteus mirabilis
MEKKKLTTAAGAPVVDNNNVITAGPRGPMLLQDVWFLEKLAHFDREVIPERRZHAKGSGAFGTFTVTHDITKYTRAKIFSEVGKKTEMFARFSTVAGERGAADAERDIRGFALKFYTEEGNWDMVGNNTPVFYLRDPLKFPDLNHIVKRDPRTNMRNMAYKWDFFSHLPESLHQLTIDMSDRGLPLSYRFVHGFGSHTYSFINKDNERFWVKFHFRCQQGIKNLMDDEAEALVGKDRESSQRDLFEAIERGDYPRWKLQIQIMPEKEASTVPYNPFDLTKVWPHADYPLMDVGYFELNRNPDNYFSDVEQAAFSPANIVPGISFSPDKMLQGRLFSYGDAHRYRLGVNHHQIPVNAPKCPFHNYHRDGAMRVDGNSGNGITYEPNSGGVFQEQPDFKEPPLSIEGAADHWNHREDEDYFSQPRALYELLSDDEHQRMFARIAGELSQASKETQQRQIDLFTKVHPEYGAGVEKAIKVLEGKDAK

SEQ ID NO: 51401 - protein, 397 aa, Polaromonas sp. JS666
MPLQFADRLNNVETSAIRELFKLLGKPGIISFAGGFPDPAMFDVEGLKEASGNVLNEEAGPALQYGATEGYQPLRDQLSTFMATKGSLVAADQLIVTTGSQQALDLIGKTMISPGDKVIVEGPTFLATIQCFRLYGAELISAPIDAHGVKTDELEKLIAQHKPKFVYLIPTFGNPSGALLSLERRKKVLELAVKYNTLMVEDDPYGDLYFSEPPPPSLLALSDTVPGSRDLLAHCGSLSKVLSPGLRIGWLIAQPELLAKATMCKQFSDAHTSTFAQATASQYLKCGRMPSTLTRVRQVYAERAAAMGAALKRELGDAIDFVQPQGGLFFWARLTGAGGKTKDAGEFAKKAIEQGVAFVPGAPFYASNPDVSTLRLSFATADVAKIEEGVGRLGKAL

SEQ ID NO: 51402 - protein, 382 aa, Chlamydophila pneumoniae AR39
MLCQQFLIEALARRKSKHTYRSLSLNSHLIDFTSNDYLGFASSPELRKEYITKLHAIESLGATGSRLLTGHSQLCQRIEEQLAAYHNFESCLIFNTGYTANLGLLYALATDQDRILHDLYIHASIYDGIRLSKAQSFPFNHNDLNHLEKRLASSHLGRTFVCVESVYSLHGSVAPLQAISELCERYSAYLIVDEAHAVGVFGDQGEGLVSALGLQDKVLATVYTFGKALGTHGAAIAGSSILKDYLINFCRPFIYTTAQPPHALTAIELAYEHNQRAFNQREHLSALIHHFREKAQNLGLQLMKDNTTTPIQSICVSGSHRARQAALQIQNSGYDVRPIVSPTVKQREELLRICLHAFNTKNEIDHLLHTLEQIFLCNVSSL

SEQ ID NO: 51403 - protein, 83 aa, Triticum aestivum
ADLYETEDEISRLLSEGKVPIGVGENTKISNCIIDMNARVGRNVSITNTEGVQEADRPELGYYIRSGIVVILKNATIKDGTVI

SEQ ID NO: 51404 - protein, 412 aa, Staphylococcus epidermidis ATCC 12228
MSEQEKNQHHYRNSSQKRHTFPWIKTIIVAIIAGIIGALLVLGIGKLLNKNGFNNEGATVHQVSNSHGGNQLDGKSNQYKSVHDMIKDVSPAIVGVINMQKSTNLDDLFNGKASKSKEAGIGSGVIYQISDGSAYIVTNNHVVDGASEIKVQLHNSKQVDAKLIGKDALTDIAVLKIKDTKGIKAIQFANSSKVQTGDSVFAMGNPLGLEFANSVTSGIISASERTIDANTSAGNTKVNVLQTDAAINPGNSGGALVDINGNLVGINSMKIAAAQVEGIGFAIPSNEVRVTIEQLVKHGKIERPSIGIGLINLSDIPENYRKELHTHKDKGVYVAKVDSENAIKKGDIITGIDGKQIKDDTDLRTYLYESKKPGETVTLKVIRDGKTQDINVKLKKQASASESSQSQSQFAQ

SEQ ID NO: 51405 - protein, 462 aa, Arabidopsis thaliana
MASTSSLALSQALLARAISHHGSDQRGSLPAFSGLKSTGSRASASSRRRIAQSMTKNRSLRPLVRAAAVETVEPTTDSSIVDKSVNSIRFLAIDAVEKAKSGHPGLPMGCAPMAHILYDEVMRYNPKNPYWFNRDRFVLSAGHGCMLLYALLHLAGYDSVQEEDLKQFRQWGSKTPGHPENFETPGIEVTTGPLGQGIANAVGLALAEKHLAARFNKPDAEVVDHYTYAILGDGCQMEGISNEACSLAGHWGLGKLIAFYDDNHISIDGDTEIAFTENVDQRFEALGWHVIWVKNGNTGYDEIRAAIKEAKTVTDKPTLIKVTTTIGYGSPNKANSYSVHGAALGEKEVEATRNNLGWPYEPFQVPDDVKSHWSRHTPEGATLESDWSAKFAAYEKKYPEEASELKSIITGELPAGWEKALPTYTPESPGDATRNLSQQCLNALAKVVPGFLGEVLTLHHPT

SEQ ID NO: 51406 - protein, 419 aa, Brassica napus
  misc_feature (142)..(142): Xaa can be any naturally occurring amino acid
  misc_feature (304)..(304): Xaa can be any naturally occurring amino acid
  misc_feature (328)..(328): Xaa can be any naturally occurring amino acid
  misc_feature (337)..(337): Xaa can be any naturally occurring amino acid
  unsure (1)..(419): unsure at all Xaa locations
YPNVTVMDPETLREIMSRHELFPKPKIGYHVFLSGLLNHEGPTWSKHRSILNPAFRIDSLKSILPAFNSSCKEMLEEWEKLASPKGTVELDAWTYCHDLARNMLARASFGDFYKDGINIFQIHQEQIDLSLQTIRSVYIPGXKFLPTKFNKRLRETERDMRAMFKAMIETKEKEIQRGRNTDKNADLLCSMLASNTKQMIEQGPASGLSLDDLIDDCKAFYLAGQSVTASLFVWTLVALSQHQEWQTKARDEISKAFGDNEPDFEGLSHLKVVSMILHEVLRFYSPAYFTCRITKQEVKLREVXLPEGVVITIPMILVHHDPDLWGEXVKQFKLERXVNGVASATKGRLSFLPFGSGPRTCIGQNFSMLQAKLFVAKVLQMFSVELSPSYTHAPFPSCNYIPTTMEVHLIIKKVEDGRS

SEQ ID NO: 51407 - protein, 94 aa, Oryza sativa
  misc_feature (75)..(75): Xaa can be any naturally occurring amino acid
  unsure (1)..(94): unsure at all Xaa locations
MACCGGNCCCGCGCQCGGGCGGRKMLPDVEATATTKTLGLPAPSNTASSGGTEMAAESAKIGGCGCNTCEWGTSXRVCCCCSCKRIYSCRRPVA

SEQ ID NO: 51408 - protein, 466 aa, Arabidopsis thaliana
MQDSGSPPLSYLTQREAAEIDETLMGPLGFSIDQLMELAGLSVAASIAEVYKPEEYSRVLAICGPGNNGGDGLVAARHLHHFGYKPFICYPKRTAKPLYTGLVTQLDSLSVPFVSVEDLPDDLSKDFDVIVDAMFGFSFHGAPRPPFDDLIRRLVSLQNYEQTLQKHPVIVSVDIPSGWHVEEGDHEDGGIKPDMLVSLTAPKLCAKRFRGPHHFLGGRFVPPSVAEKYKLELPSYPGTSMCVRIGKPPKVDISAMRVNYVSPELLEEQVETDPTVQFRKWFDEAVAAGLRETNAMALSTANKDKKPSSRMVLLKGFDENGFVWFTNYESKKGSDLSENPSAALLFYWEILNRQVRIEGPVERIPESESENYFHSRPRGSQIGAIVSKQSSVVPGRHVLYDEYEELTKQYSDGSVIPKPKNWGGFRLKPNLFEFWQGQPSRLHDRLQYSLQDVNGNPAWKIHRLAP

SEQ ID NO: 51409 - protein, 140 aa, Zea mays
MADQEAPVAVEAPTPVLGEPMDLMTALQLVMKKSSAHDGLVKGLREAAKAIEKHAAQLCVLAEDCDQPDYVKLVKALCAEHNVHLVTVPAAKTLGEWAGLCKIDSEGKARKVVGCSCVVVKDYGEESEGLNIVQEYVKSH

SEQ ID NO: 51410 - protein, 253 aa, Xanthomonas oryzae pv. oryzae KACC10331
MAQPERSAPSVFLHHGFRPPLPSPLLCLWKTARMNELNHLLENNRAWSERIRREDPEFFSKLSTQQTPEYLWIGCSDSRVPANQIIDMAPGEVFVHRNIANVVVHTDLNCLSVIQFAVDVLKVKHVLVVGHYGCGGVFASLTQKRMGLVDNWIRHVTDVADKHEACLHDAGDLPIQHARLCELNVLEQVVNVCRTTIVRDAWERGQELYVHGWVYSLRDGRAHDLGMSIDRHELVQERYDAALAKIQADRAER

SEQ ID NO: 51411 - protein, 340 aa, Ganoderma sp. BS-1
TQYCDGLRGPMVVYDPEDPHASLYDVDDETTVITLADWTHTAARLGNRFPGGADSTLINGLGRFAGGASSDLAVFNVTQGQRYRFRLVSMACDPNFTFSVDGHNMTVIEADAVNHEPVVVDSIQIYAGQRYSFVLTADQDVDNYWIRALPNVGTTTFDGGVNSAILRYSGADAIEPTTTQTTSVLALNETDLVPLENLAAPGTAEVGGVDYALNLDFNFNGTEFFINDVAFVPPSVPALLQILSGSVAAADLLPSGSYYSLPSNASIEISFSMGSGGAAGAPHPFHLHGHTFYVVRSAGQTDYNFVNPPQRDVVNVGEVGDNVTIRFTTNNPGPWFLHCH

SEQ ID NO: 51412 - protein, 392 aa, Ganoderma sp. BS-1
WHGFFQKGTNWADGVAFVNQCPISSGNSFLYDFQVPGQAGTYWYHSHLSTQYCDGLRGPFVVYDPEDPLLSMYDVDDDSTVITLTDWYHTAAKLGPAFPLGADATLINGLGRSPATSTAELAVINVTQGKRYRFRLISMSCDPNYTFSVDGHDMTVIEADGIETQPVTVNAIQIFAAQRYSFVLTADQDVDNYWVRANPNFGNVGFTDGINSAILRYDGADPVEPTTSQQTTQNLLNEVDLHPYVAIPTVPGSPTPGGVDLAINFAFNFNGSRFFINGDTFVPPTVPVLLQILSGAQTAQELLPSGSVYELPMNSSIELTFPATASAPGTPHPFHLHGHEFAVIRSAGSTEYNYDNLRVRDVVSTGVAGDNVTIRFQTNNPGPWILHCHIDF

SEQ ID NO: 51413 - protein, 730 aa, Oryza sativa
MTVMELKKLPLGFRFHPTDEELVRHYLKGKITGQIRSEADVIPEIDVCKCEPWDLPDKSLIRSDDPEWFFFAPKDRKYPNGSRSNRATEAGYWKATGKDRVIRSKGDKKKQQVIGMKKTLVFHRGRAPKGERTGWIMHEYRTTEPEFESGEQGGYVLYRLFRKQEEKIERPSPDEVDRSGYSPTPSRSTPDNMEPIEDGNTPLNRESPESALHESPIDLPALTEAQAAPITRWLADRTDNATTNEVNISHMPHHGLDGGAKQASPSAGAFPQLIGSQQNIHDNNELATVSAPMLPHEDFNNFPLGAIGNFDGDMNPRDPVEEFLNQTIADPDEHSSTTSKAQYDSDTGIIPTEFENHGVMQGEFMDDLSGLENLDFWPDDRNPQLSALYEDTPLLPYDSTDQDVLSMDSGAESLQDLFNSMDDSNARNNVWGNEPFLQGTGFPMSWPLQPNSTFPNQGTASRRLMLQLSESLSPDFDASMTRDECEDEEPGIVVTSKYVNEAPEESTAEKDMPSDGDDAEPTGITILRRRHAPTASSFSDGDDAESTGITILRQHQAPNASLLSDGDDAESTGITILRRRQAPTASSASSFTQQGAAVQRVRLQSNLDAAPCSSVDGSSSCIINEGESERTMEKPEIEENAGSTLAEGGTCHEDDQKEHDASAANAKSVLRLRKTAEGSDKENKQEEEEGVLDSHVRAPGNKRGFPSYIIWLVLSVALALLISLGIYGWV

SEQ ID NO: 51414 - protein, 192 aa, Penicillium marneffei
MVVATIKCVVVGDGAVGKTCLLISYTTNKFPSEYVPTVFDNYAVTVMIGDEPYTLGLFDTAGQEDYDRLRPLSYPQTDVFLVCFSVTSPASFENVREKWFPEVHHHCPGVPCLIVGTQTDLRDDPAVREKLAKQKMQPVRKEDGDRMAKELGAVKYVECSALTQYKLKDVFDEAIVAALEPAPKKRPKCVVL

SEQ ID NO: 51415 - protein, 338 aa, Mannheimia haemolytica
MAILVTGGAGYIGSHTLVELLNENREIVVLDNLSNSSEVSLERVKQITGKSVKFYQGDILDRDILRKIFAENQIESVIHFAGLKAVGETSENRYVTIKNNVTGSIVLVEEMLKANVNTIVFSSSATVYGDPQIIPIVESCPVGGTTNPYGTSKYMVERILEDTVKAFPQLSAVVLRYFNRVGAHESGLIGEDPNGIPNNLMPFISQVAVGKLPQLSVFGGDYNTHDGTGVRDYIHVVDLALGHLKALDKHQNDAGFHVYNLGTGTGYSVLDMVKAFEAANGITIPYKVVDRRPGDIAVCYSAPQKALEQLGWETERGLEQMMKDTWNWQKNNPNGYKG

SEQ ID NO: 51416 - protein, 119 aa, Zea mays
MARSSFKLEHPFERRQAEANRIREKYPDRIPVIIEKAERSDIPDIDKKKYLVPADLTVGQFVYVVRKRIKLSAEKAIFIFVKNTLPPTAALMSAIYEENKDEDGFLYMTYSGENTFGLF

SEQ ID NO: 51417 - protein, 311 aa, Zea mays
MAASVALSSGHRMPAVGLGVWRMEKADIRGLIHTALRVGYRHLDCAADYQNEAEVGDALAEAFQTGLVKREDLFITTKLWNSDHGHVLEACKDSLKKLQLDYLDLYLIHFPVATRHTGVGTTSSALGDDGVLDIDTTISLETTWHAMEELVSMGLVRSIGISNYDIFLTRDCLAYAKIKPAVNQIETHPYFQRDSLVKFCQKHGICVTAHTPLGGSTANAEWFGTVSCLDDPVIKSLADKYGKTPAQLVLRWGLQRDTVVIPKTSKVERLQENFDVFGFDISGEDMERMKAIDRKYRTNQPAKFWGIDLYA

SEQ ID NO: 51418 - protein, 596 aa, Prochlorococcus marinus subsp. pastoris str. CCMP1986
MSNIDLKRRTKIVATIGPATQSEEIITDLIKAGVTTFRLNFSHGDHKDHQERIQTIRKVSEKLDLDIGILQDLQGPKIRLGRFKDGPVKVKKGDKFSLTSNEVECTKSIANVTYNKLAQEVTSGKRILLDDGKIEMIVEKVDIGNNLLECKVTVGGVLSNNKGVNFPDVQLSVKALTDKDIEDLEFGLTAGVDWIALSFVRNPSDINEIKNLINKNGHSIPVVAKIEKFEAIDQIDSILPLCDGVMVARGDLGVEMPAEEVPLLQKELIRKANTLGIPIITATQMLDSMASNPRPTRAEVSDVANAILDGTDAVMLSNETAVGDYPVEAVETMATIARRIERDYPLKAIESHLPSTIPNAISAAVSNIARQLDAGAIIPLTKSGSTARNVSKFRPPTPILATTTERCVARRLQLVWGVTPLLVKNDDRTAKTFSIAMQIAQELGILKQGDLVVQTAGTLTGISGSTDLIKVGLVRKVVTRGISVGEIGVTGKARNIKTNLDLSLISPGEILFVPKNILMDLPFTKIITGIVTDENIDECYKVFKKNNIKISTICNLSAIDNLVSNGDLITLQLNEGVVYMGQIEDDEDALDKYKYV

SEQ ID NO: 51419 - protein, 389 aa, Streptomyces avermitilis MA-4680
MQTQTLAQTDISAENAEPDAETDVIAAVPAQSRAAHHPETETEPTAPPEPDEPPAGAVESVDVVETVELVEAPEPPAPRARSNDTGGPSSDLFRQYLREIGRIPLLTAAEEVELARRVEAGLFAEEKLSSTPDLDSQLGLDLDKLVVMGRMAKRRLIEANLRLVVSVAKRYVGRGLTMLDLVQEGNLGLIRAVEKFDYARGYKFSTYATWWIRQAMSRALADQARTIRVPVHVVELINRVVRVQRRMLQERGYEPTPEEVAAHLDLPGERVSEVLRLAQEPVSLHAPVGEEDDVALGDLIEDGDATSPVESAAFLLLREHLDAVLSTLGERERKVVQLRYGLADGRPRTLEEIGRIFGVTRERIRQIESKTLNKLRDHAFADQLRGYLD

SEQ ID NO: 51420 - protein, 406 aa, Polaromonas sp. JS666
MLTLDFHPTGRHFLQIPGPSPVPDRILRAMSLPTIDHRGPEFAALGLKVLADIRKIFQTRQPVIIYPASGTGAWEAALANTLSPGDHVLMYETGHFAALWHKLAARLGLKTEVMSLSGPEAWRHGVRADMIEERLKADTQHAIRAVCVVHNETSTGVTSNIVAVRKAIDAAKHPALLLVDTISGLASADYRHDEWGVDVSISGSQKGLMLPPGISFNAVSAKALEASKTARLPKSFWAWDEIIEMNKTGYWPSTPNTNLLYGLNEACDMLLEHGLDVVFARHLRWAEGVRAAVRAWGLQIQCADPAVYSPVLTGVMTPEGIDADAVRKIIYERFDCSLGTGLGKVKGRMFRIGHLGDCNDLTLMAALSGCEMGLKLAGVKLAGSGVQAAMDHFSSHAAVVPLRKAA

SEQ ID NO: 51421 - protein, 257 aa, Arabidopsis thaliana
MSGKRLDGKIVIITGGASGIGAESVRLFTEHGARVVIVDVQDELGQNVAVSIGEDKASYYHCDVTNETEVENAVKFTVEKYGKLDVLFSNAGVIEPFVSILDLNLNELDRTIAINLRGTAAFIKHAARAMVEKGIRGSIVCTTSVAAEIAGTAPHGYTTSKHGLLGLIKSASGGLGKYGIRVNGVAPFGVATPLVCNGFKMEPNVVEQNTSASANLKGIVLKARHVAEAALFLASDESAYVSGQNLAVDGGYSVVKP

SEQ ID NO: 51422 - protein, 555 aa, Zea mays
MDSVRSWFQKFQPRDKSKRPVVAARHGKDPGKPPMDDAPSSATKQRVAAAKQYIENHYKTQMKSLQDRKERRWMLERKLQDAEVPVEEQNNILKHLEKKETEYMRLQRHKMGVEDFELLTIIGRGAFGEVRLCREKASKNVYAMKKLKKSEMLRRGQVEHVKAERNLLAEVDSAYIVKLYYSFQDEEFLYLIMEYLPGGDMMTLLMRKDTLTEDEARFYIAETVLAIESIHKHNYVHRDIKPDNLLLDRSGHLKLSDFGLCKPLDSSNFPNLNEPDYMSGKVTTPLPDTTRLSNPSAPRRTQQEQLSHWQKNRRMLAYSTVGTPDYIAPEVLLKKGYGTECDWWSLGAIMYEMLVGYPPFYSEDPMSTCRKIVNWRSHLKFPEEAKLPPEAKALISKLLCNVEHRLGTKGAHEIKAHPWFGGVQWEKLYQMKAAFIPEVNGELDTQNFENFEEIGTQIQSSSKSGPWRKMLPSKDANFVGYTYKNFEIVNDDEVAGIAELKKKSSKPKRPTIKTMFERMDGEEPVQGSFLSMLPPEGQPSSHSSVPQEKYQPRRK

SEQ ID NO: 51423 - protein, 1018 aa, Magnaporthe grisea 70-15
MGFLSLFSRKRSSSKLSGRLLKAQAYDATIASEPPQRGAYPVAGNGPNVLETLSKSAKFKSTQFPLHIDIEDACAPSPLVPRFRGDDVQRPKTAPNGSKSGVSPTKDSSKRQSTFMGRTLSFRKSRIISNPTPDLPDSSATPEFAQYGQGFVQVFPQTLPSLPASSPAVTSPIKLTHRRTKSMLSDGGRSVDLLDARSELSPQSPDFRTRLEAAGLRSFGEDVADRNIAISLDSSHVKAFYTPAAESKTRPPNRDLPLTSVSKDKPKPLASSRSAANLTKSPSLRLFPDQTPLAKISTAAKPAKDNSGLLQASATGLKRQGSLSQGTYVPSGSTSENVAKNSARMRAQSLHKVTLPKNTSTPSLPDRPATSWDPRTDDPSPQVPHYIPRRQDEDAEGLKKSKIPVATPFRHSTHPGTKFHSRFQTYQPKSDSRPGTSSNVGSVPRTSTSAASDPRPSSSRANSGHVLELPASFAVSDGSDWFAGLDDTKSAPSPCVSISHTHNERPEPRSVGGRRCPRTQSMFSLSRRSDLEDISEFVPERTSSRRRWSVASDALSVSSLGSFAHTPRPQSVLTPETSIDLGFQVMKKSISKTSIRPSQSRGSIYSTNAQGILEIVEDIPTENGQAQKEDFNIDDYVSSDDDSFVAPRHPRVQDGENLLFRDGRYGISQLPGLNHSYTTTEPASAPVVRGRAPPVTMSNLPSERPSSKKSPRVTGRGLDSIASVYNTRRSISQSHARFRRPSVEVDDSSDGEIDSLRDRHGHGHRRVSQQQSPSYRDRNGSRRLSVTAVKYDNKSNIEIVHATRVCVCGAYADEPKLEKPSSFAAGQMVSISYHPSPLFLGEDARAMKGPLSIHVQGDLAQTLSNDQLKQLKDVFDLIDKDGTGAISASEFAEAMESLGLSSSAAEAQEIISEIDQNKDGQIDFHEFLRVMSHPETHDALSPNERSKDSKKDERELLAAFKVFDSDGSGSISPEELRHALRPLGYTPAEIDEMIAHADLDGNGSIDYQEFVELMSQKH

SEQ ID NO: 51424 - protein, 500 aa, Ralstonia eutropha JMP134
MLRSRHLLSGSFFNGRTTMLKLQDPSLLRQQCYIDGRWTDGERRIDVTNPATGELVAQVPQFGVAETRHAIEAANRALPAWRARLAKERSALLRKWFELILANQDDLARIMTAEQGKPFAEAKGEIAYAASFIEWFAEEGKRVYGETIPAPVSSQRIVVTKEPIGVCAAITPWNFPAAMITRKAGPALAAGCTMVVKPASQTPLTALALAVLAERAGIPAGVLSVVTGSAGAIGGELSSNPLVRKLTFTGSTEVGRVLMAQTASTIKKVSMELGGNAPFIVFDDADLDAAVEGAIISKYRNAGQTCVCANRIYVQDKVYDAFAQKLVAAVAQLKVGNGMEDGVRIGPLIDEKAVAKVEEHIADALGKGARVLEGGHRHGLGHTFFQPTVLADVAPNMLVAREETFGPLAPLFRFKTEDDVVAMANDTEFGLASYFYARDLGRVWRVSERLEYGMVGVNTGLISNEVAPFGGVKQSGVGREGSHYGIEDYLVIKYTCMAGI

SEQ ID NO: 51425 - protein, 484 aa, Oryza sativa (japonica cultivar-group)
MAAPSVAVDNLNPKVVLNCEYAVRGEIVIHAQRLQQQLQTQPGSLPFDEILYCNIGNPQSLGQKPVTFFREVIALCDHPCLLEKEETKSLFSADAISRATTILASIPGRATGAYSHSQGIKGLRDAIAAGIASRDGYPANADDIFLTDGASPGVHMMMQLLIRNEKDGILCPIPQYPLYSASIALHGGALVPYYLNESTGWGLEISDLKKQLEDSRLKGIDVRALVVINPGNPTGQVLAEENQRDIVKFCKNEGLVLLADEVYQENIYVDNKKFNSFKKIARSMGYNEDDLPLVSFQSVSKGYYGECGKRGGYMEITGFSAPVREQIYKVASVNLCSNITGQILASLVMNPPKAGDASYASYKAEKDGILQSLARRAKALENAFNSLEGITCNKTEGAMYLFPQLSLPQKAIDAAKAANKAPDAFYALRLLEATGIVVVPGSGFGQVPGTWHIRCTILPQEEKIPAIISRFKAFHEGFMAAYRD

SEQ ID NO: 51426 - protein, 581 aa, Arabidopsis thaliana
MEKVTNSDLKSSVDGGVVDVYGEDSATIEHNITPWSLSVSSGYSLLRDPRYNKGLAFTEKERDTHYLRGLLPPVVLDQKLQEKRLLNNIRQYQFPLQKYMALTELQERNERLFYKLLIDNVEELLPIVYTPTVGEACQKFGSIFRRPQGLFISLKDKGKILDVLKNWPERNIQVIVVTDGERILGLGDLGCQGMGIPVGKLALYSALGGVRPSACLPVTIDVGTNNEKLLNDEFYIGLRQKRATGQEYSELLNEFMSAVKQNYGEKVLIQFEDFANHNAFELLAKYSDTHLVFNDDIQGTASVVLAGLVSAQKLTNSPLAEHTFLFLGAGEAGTGIAELIALYMSKQMNASVEESRKKIWLVDSKGLIVNSRKDSLQDFKKPWAHEHEPVKDLLGAIKAIKPTVLIGSSGVGRSFTKEVIEAMSSINERPLIMALSNPTTQSECTAEEAYTWSKGRAIFASGSPFDPVEYEGKVFVSTQANNAYIFPGFGLGLVISGAIRVHDDMLLAAAEALAGQVSKENYEKGMIYPSFSSIRKISAQIAANVATKAYELGLAGRLPRPKDIVKCAESSMYSPTYRLYR

SEQ ID NO: 51427 - protein, 475 aa, Oryza sativa
MVQDEGSSSSVTSSPLHNFSNMPLHPAAAASPTPPWMVRELRSDERGLCLIHLLLNCAAAAAAGRLDAANAALEHIASLAAPDGDAMQRVAAAFAEALARRALRAWPGLCRALLLPRASPTPAEVAAARRHFLDLCPFLRLAGAAANQSILEAMESEKIVHVIDLGGADATQWLELLHLLAARPEGPPHLRLTSVHEHKELLTQTAMALTKEAERLDVPFQFNPVVSRLDALDVESLRVKTGEALAICSSLQLHCLLAFDDDAGVVAGGDKERRSPESGLSPSTSRADAFLGALWGLSPKVMVVAEQEASHNAAGLTERFVEALNYYAALFDCLEVGAARGSVERARVERWLLGEEIKNIVACDGGERRERHERLERWARRLEGAGFGRVPLSYYALLQARRVAQGLGCDGFKNSTLGVAISTCRKKRPRSSSPCRKFHGIGSRWRGVSKFHQTSAKVGSSNLKSVPALLSTVTA

SEQ ID NO: 51428 - protein, 590 aa, Geobacillus stearothermophilus
MFKEAIYHRPKDNFAYAYDEQTLHIRLRTKKNDVEHVRLIYGDPYEWENGHWQVSYQSMQKSGTDELFDYWFIALTPPYRRLRYGFELTSNNEQIVYTEKGFYRTAPMDDTAYYFCFPFLNKIDVFQAPEWVKDTIWYQIFPERFANGNEALNPAGTLPWGSADPTPTSFFGGDFEGIIQKLDHLVDLGVNGIYFTPIFKASSNHKYDTIDYFEIDPQFGDKQTFKRLVELCHQKAIRVMLDAVFNHSGYEFPPFQDVLKYGENSKYKHWFHIREFPLQTVPRPNYDTFAFTPNMPKLNTENQEVKNYLLDVATYWIREFDIDGWRLDVANEVDHQFWREFRQAVKTIKPDAYILGEIWHDAMPWLRGDQFDAVMNYPFTNGTLRFFAQHEIRASQFVGMMTHVLHSYPTNVNEVAFNLLGSHDTPRLLTLCKEDVRKAKLSFLFQLSFTGTPCIYYGDEIGITGDQDPGCRKCMIWDEHQQNRELFRHVQKLIALRKAYKAFGNRGNLHFIDANDETNHLIYMKTFEEEAIIFLVNNNEQEIEITLPLSLKGKLLTNLWTNEQFSAEADTLKSTLPPYGFFIYKIEDWL

SEQ ID NO: 51429 - protein, 111 aa, Synechococcus elongatus PCC 6301
MSMKTLPKERRFETFSYLPPLSDRQIAAQIEYMIEQGFHPLIEFNEHSNPEEFYWTMWKLPLFDCKSPQQVLDEVRECRSEYGDCYIRVAGFDNIKECQTVSFIVHRPGRY

SEQ ID NO: 51430 - protein, 328 aa, Chlamydophila pneumoniae AR39
MAFKEVVRVAVTGGKGQIAYNFLFALAHGDVFGVDRGVDLRIYDVPGTERALSGVRMELDDGAYPLLHRLRVTTSLNDAFDGIDAAFLIGAVPRGPGMERGDLLKQNGQIFSLQGAALNTAAKRDAKIFVVGNPVNTNCWIAMKHAPRLHRKNFHAMLRLDQNRMHSMLAHRAEVPLEEVSRVVIWGNHSAKQVPDFTQARISGKPAAEVIGDRDWLENILVHSVQNRGSAVIEARGKSSAASASRALAEAARSIFCPKSDEWFSSGVCSDHNPYGIPEDLIFGFPCRMLPSGDYEIIPGLPWEPFIRNKIQISLDEIAQEKASVSSL

SEQ ID NO: 51431 - protein, 388 aa, Shigella flexneri 2a str. 301
MIQFRVVWVDDRNQIQVNRAWRVQFSSAIGPYKGGMRFHPSVNLSILKFLGFEQTFKNALTTLPMGGGKGGSDFDPKGKSEGKVMRFCQTLMTELYRHLGADTDVPAGDIGVGGREVGFMAGMMKKLSNNTACVFTGKGLSFGGSLIRPEATGYGLVYFTEAMLKRHGMGFEGMSVSVSGSGNVAQYAIEKAMEFGARVITASDSSGTVVDESGFTKEKLARLIEIKASRDGRAADYAKEFGLVYLEGQQPWSVPVDIALPCATQNELDVDAAHQLIANGVKAVAEGANMPTTIEATELFQQAGVLFAPGKAANAGGVATSGLEMAQNAARLGWKAEKVDARLHHIMLDIHHACVEHGGEGEQTNYVQGANIAGFVKVADAMLAQGVI

SEQ ID NO: 51432 - protein, 391 aa, Ganoderma sp. BAFC2488
WHGFFQRSTNWADGPAFVTQCPIASGDSFLYDFRVPGQAGTFWYHSHLSTQYCDGLRGPLVVYDPFDPLGWLYDVDDDSTVITLADWYHFAARLGPRFPDLPIPPLSTVLAGSPDTPGADLAVVNVTHGKRYRFRRVSLSCDPSYTFSIDGHERTVIEADGVETHPVTANAIEIFAAQRYSFVLTANQTIDNYWIRANPNLGNVGFTGGINSAILRYEGANAAEPTTSQQSTQNLLKETDLHPLIPRWTVPGRPQPGGVDLALNMAFDFNGTNFFVNNATFDPPPVPVLLQILSGKHTAQELLPPGSVYALPSHSSIEITFPATARAPGGPHPFHMHGHVFAAVRSAGSSTYNYRNPVWRDTVSTGTSAANDNVTIRFRTDNPGPWFLHCH

SEQ ID NO: 51433 - protein, 399 aa, Ralstonia eutropha JMP134
MSPLHLSHFTATSCIGTGLDDTVSALREQRGGLAPCQFGDIRLDTWVGEVPGVDSVTLPPGLADFACRNNSLALLALEQDGFADRVREAVARYGADRIGVFLGTSTAGVLQTELAYRQRDPQTGALPAGLSYAGTHSPYSLPGFVRAYFGLQGPANAVSSACSSGAKVFTSARRLIEAGLIDAAVVGGVDSLCHTTLYGFGSLELLSNQPCRPFDADRNGISIGEAAAFVLVERTPDPAPDGAILLLGIGESSDAHHMSAPHPEGLGASMAMEQALTRAGVSPEQVDYVNLHGTATRANDATEARAISALLPGTPCSSTKGATGHTLGAAGALEAVISALALRHGLLPAGINTTQIDPALAVDYCLATREQPLRHVLSNAFGFGGSNCSLLLGRATGAQ

SEQ ID NO: 51434 - protein, 237 aa, Arabidopsis thaliana
MDIEQKQAEIIDQLVKRASTCKSEALGPLIIEATSHPSLFAFSEILALPNVAQLEGTTDSVYLDLLRLFAHGTWGDYKCNATRLPHLSPDQILKLKQLTVLTLAESNKVLPYDTLMVELDVSNVRELEDFLINECMYAGIVRGKLDQLKRCFEVPFAAGRDLRPGQLGNMLHTLSNWLNTSENLLISIQDKIKWADNMSEMDKKHRKEAEEGVEEVKKSLSMKVSRAWSPIGFTFPY

SEQ ID NO: 51435 - protein, 140 aa, Triticum aestivum
  misc_feature (10)..(10): Xaa can be any naturally occurring amino acid
  misc_feature (17)..(17): Xaa can be any naturally occurring amino acid
  unsure (1)..(140): unsure at all Xaa locations
VPAYVRLLRXNEAEVRXIAAAGKVTKFCRILSPQLAIQHILPCVKELSSDSSQHVRSALASVIMGMAPVLGKDATIEQLLPIFLSLLKDEFPDVRLNIISKLDQSTVKPCLVELSEDPDVDVRYYANQALQACDQIMMSS

SEQ ID NO: 51436 - protein, 283 aa, Oenococcus oeni PSU-1
MVLSRSVPNIVLNDGHSLPAIGLGTYLVRGGQGVDQILSAIEDGYRLIDTSTNYDSEGAVGEAIRRSGIPRSEFIVTSKLPGKYHHYQDALMMIQESIFRMGIDYLDLYLIHWPLPKRDHYVEAWKALVDAQKLGLIRSIGVSNFLPEHLDRIINESGVTPAVNQIEVHPYWVQEDMLAANKSRGIVSEAWSPLGRGSAALKEDIIKNLADKYGKNTGQIILRWHTQRGIIPLPKASSLIHQRSNIDIFDFSLTSSEIEQINALNRSDGRVDGQDPNTYEEFD

SEQ ID NO: 51437 - protein, 297 aa, Zea mays
MAFSSSLAPFFPPSGTFRAHPARRLRADAPGRFVASCLPPPDVVVTREQGKNARLISALEKHNVHPLELPLIKHVEGPDTDRLLDVLRNDKFDWIIVTSPEAAAVFLQGWKAAGSPKVRVAVVGEGTARVFHEVSESDDQSLELAFSPSKALGKVLASELPRSNRNSCKVLYPASAKAGHEIEDVLSERGFDVTRLNTYTTVPVEDVDPLTLNLAISAPVVALASPSALRAWLNLISKSDNWNNSVACIGETTASAAKKLGLKSIYYPTTPGLEGWVESILEALRVHRTASKEAPKR

SEQ ID NO: 51438 - protein, 289 aa, Triticum aestivum
MARMAAWVLAILLASCAFALATFDKEFDVTWGDGRGKILNNGQLLTLGLDKISGSGFQSKHEYLFGKIDMQLKLVPGNSAGTVTAYYLSSQGPTHDEIDFEFLGNVTGEPYTLHTNVFTQGQGQREQQFRLWFDPTNDFHTYSILWNPKHIIFMVDDMPIRDYKNLEGKGIAFPKNQPMRLYSSLWNADDWATQGGRVKTDWSHAPFSASYRGFKADACVVTVGGRPRCGASVGTEVAPGTGAAGEWYNQEPDLTRQQRMRWVQSNYMIYNYCTDPKRVAKGVPAECSM

SEQ ID NO: 51439 - protein, 546 aa, Streptococcus agalactiae 2603V/R
MNKFKVNISGMTCTGCEKHVESALEKIGAKNIESSYRRGEAVFELPDDIEVESAIKAIDEANYQAGEIEEVSSLENVALINEDNYDLLIIGSGAAAFSSAIKAIEYGAKVGMIERGTVGGTCVNIGCVPSKTLLRAGEINHLSKDNPFIGLQTSAGEVDLASLITQKDKLVSELRNQKYMDLIDEYNFDLIKGEAKFVDASTVEVNGTKLSAKRFLIATGASPSLPQISGLEKMDYLTSTTLLELKKIPKRLTVIGSGYIGMELGQLFHHLGSEITLMQRSERLLKEYDPEISESVEKALIEQGINLVKGATFERVEQSGEIKRVYVTVNGSREVIESDQLLVATGRKPNTDSLNLSAAGVETGKNNEILINDFGQTSNEKIYAAGDVTLGPQFVYVAAYEGGIITDNAIGGLNKKIDLSVVPAVTFTNPTVATVGLTEEQAKEKGYDVKTSVLPLDAVPRAIVNRETTGVFKLVADAETLKVLGVHIVSENAGDVIYAASLAVKFGLTIEDLTETLAPYLTMAEGLKLVALTFDKDISKLSCCAG

SEQ ID NO: 51440 - protein, 937 aa, Synechococcus elongatus PCC 6301
MQSLLQREQESILSRTYTVVRVQGTSIEKQLSRQIQVLDEALQRAGGLRTGSRLVRWQAKNQYTGAIQPVELPELQLGGRWLDQVSRFDQAVPVIDTVSRQMGGTVTIFQRINDRGDMLRVATTVPNQDKQRAIGTYIPVTNPSGDPNPVIAAVLKGQTYRGPAYIVNDWYIAIYQPLKDAQGRVIGMIYAGQRQDQTGELARSFQDLRFGQTGSAFVFLGQGSQRGETILTSDPSLQKKNFWDAKDASGQFFLRTSIADAIRQPGAFIRVRYLARPWTEGLQSTQPARQEQMLLVYYRPWNWVIGIRQDKQEFAEPFRRLEAIQQRSLYIQLLLGVIIAVLGAIAARGWAAHLGMRIEQLAHAADAMASGQLQQQIPTSGRDELTVLAQAFNRMAVTLRELLVSLEHRVQERTAALRETNDRLEQAREQAEAANQAKSAFLANMSHELRTPLNAIIGYSEMMMEEAEDGIEVEELLPDFRKINNAGKHLLELINSILDLSKIEAGRMELYLESFSLPELINGVKSIIKPLIEKNQNQLLVDCPADIGLMTADVTKLRQTLLNLLSNASKFTHQGTIQLQVAAQGDQVVFKVVDSGIGMSPEQIDRIFEAFAQADDSTTRKFGGTGLGLSISRHFIEMMGGKITVESVLGEGSTFTITLPRQVQPPQSIPAVDPVLTDEAIATATEQEDQNQPVVLVVDDEPSARELLRRMLEKEGYRVVTAAGGAEGLQRAQELRPALITLDLMMPQVDGWSVLTALKADPMLAEIPVVMVSMVEGRSLSYALGAAGYLHKPIDRDQLRRILEGYTHPDRQPLALVIEDDPVNRSLLRQLLERDGWQVAEANQGQQGLAVLESLEQPPDLILLDLMMPQMDGFAFVDALRANGNWQTLPVIVVTAKDLTEQDRQRLQGRVSQVIAKGNLAIDRLLAEIRQVGANRV

SEQ ID NO: 51441 - protein, 361 aa, Candida glabrata CBS138
MEYSSQHHSTHMQQQQHQQQHQHNTHGTSQQSTLLAQRSTVSKGKYSLQDFHIMRTLGTGSFGRVHLVRSVHNGRYYAIKVLKKAQVVKMKQIEHTNDERRMLKLVEHPFLIRMWGTFQDSRNLFMVMDYIEGGELFTLLRKSQRFPNPVAKFYAAEVTLALEYLHFHNIIYRDLKPENILLDRNGHIKITDFGFAKEVETVTWTLCGTPDYIAPEVIATKPYNKSVDWWSLGVLIYEMLAGYTPFYDTTPMKTYEKILHGKVVYPQFFNSDVIDLLSKLLTADLTRRIGNLQKGAQDIKSHPWFAEVVWEKLLAKDIETPYEPPITAGVGDTSLFDQYPEEQLDYGVQGSDPYASYFTDF

SEQ ID NO: 51442 - protein, 442 aa, Mycobacterium avium subsp. paratuberculosis K-10
MPALLWFRRDLRLHDHPALSAAADSDEVLACFVLDPRLQRSSGPRRLQFLGDSLRVLRDELDGRLLVTRGRPDIRIPEIAKAIGASSVHVSEDFTPFGKRRDARVRAALASVPLVATGSPYLVAPGRVTKPDGSPYQVFTPFLRRWRDTGWRPPVKTGAASARWLDPARLGITDCEIPDPGATLDLAAGEEAARNKWKSFVDNGLANYADDRHRPDIEGTSRMSAHLKFGTIHPRTLVADLDLRAAAARAYLRELAFRDFYADVLHHRPASAWRNWNSAFDAIRTDTGAEAGRRFAAWKAGETGFPFVDAGMRQLRQTGFMHNRVRMTVASFLVKDLHLPWQWGAHWFLQQLVDGDLANNQHGWQWCAGCGTDAAPYFRVFNPAAQGEKFDPSGDYIRRWVPELRCADDPHLRTGERPPGYPAPIVDHATERAEALRRYRSM

SEQ ID NO: 51443 - protein, 333 aa, Arabidopsis thaliana
  misc_feature (14)..(14): Xaa can be any naturally occurring amino acid
  unsure (1)..(333): unsure at all Xaa locations
MATSTTMSHQAIGXSVVSQRPFKASQFLKEPLNNVPMKFRQKRFKIEATASQISVVDNTFLSPSPSKNKPHESKKKSNEAALILIRHGESLWNEKNLFTGCVDVPLTQKGVGEAIEAGKKISKIPVDLIFTSSLIRAQMTAMLAMTQHRRKKVPIILHNESVKAKTWSHVFSEETRKQSIPVIAAWQLNERMYGELQGLNKKETAERYGTQQVHEWRRSYEIPPPKGESLEMCAERAVAYFEDNIKPELASGNNVMIAAHGNSLRSIIMYLDDLTSQEVTTLDLSTGVPLLYIFKEGKFMKRGSPVGSTEAGVYAYTKRLAQYREKLDAAATI

SEQ ID NO: 51444 - protein, 562 aa, Vibrio vulnificus CMCP6
MNNDKRPLYIPFAGPALLSTPLLNKGSAFSAEERISFNLEGLLPETTETIQEQVERAYMQYKAFESDMDKHIYLRNIQDTNETLFYRLVQNHITEMMPIIYTPTVGAACENFSNIYRRGRGLFVSYANRDRIDDILNNASNHNVKVIVVTDGERILGLGDQGIGGMGIPIGKLSLYTACGGISPAYTLPIVLDVGTNNPQRLADPMYMGWRHPRITGADYDAFVEEFIQAVQRRWPDALIQFEDFAQKNAMPLLERYKNRICCFNDDIQGTAAVTVGSLMAACQAAGSKLSEQRITFLGAGSAGCGIAEAIIAQMVSEGISDKKARSQVFMVDRWGLLQEGMPNLLDFQQRLVQKHSVTAKWETEANGFSLLDVVKNAKPTVLIGVSGAPGLFTQEVIQEMHKHCPRPIVFPLSNPTSRVEAVPADIIRWTNGDALVATGSPFDPVIHEGKTYPIVQCNNSYIFPGIGLGVLAVNAKRVTDEMLMESSRALATCSPLAINGKGALLPPLEEIHTVSKRIAYAVAKKAIEQGVALEIADDALQVAIEQHFWQPVYRRYKRTAF

SEQ ID NO: 51445 - protein, 394 aa, Prochlorococcus marinus subsp. pastoris str. CCMP1986
MTETKLISTLNKENLPHLDKTYVPSRLLLGPGPSNANPEVLKALALNPIGHLDEAYIELMSEVQKLLRYTWQCNNRITLPMSGTGSAAMEASIANFIEPGEKILIAKKGYFGDRLVDMASRYNADVSVIEKEWGEAFTFEEIKYEIETKKPVIFAIVHAETSTGVLQPLEGIGDLCRKNNCLFLVDAVTSLGALELFIDDWKIDLAYSCSQKGLSCPPGLSPFTMNKRAEDKLSARTSKVPNWYLDLSLLNRYWGSDRVYHHTAPVNMNFAIREGLRLIANEGLENIWRRHNSNAIKLWKGLESLGMDLHVSSEFRLPTLTTVKIPPAVDGDAYRNHLLKNFGIEIGNGLGALSGKVWRIGLMGFNSNEENVDRLLNLFDTELKKFSIFDSSSF

SEQ ID NO: 51446 - protein, 453 aa, Gentiana triflora
MSPVSHVAVLAFPFGTHAAPLLTLVNRLAASAPDIIFSFFSTSSSITTIFSPTNLISIGSNIKPYAVWDGSPEGFVFSGNPREPIEYFLNAAPDNFDKAMKKAVEDTGVNISCLLTDAFLWFAADFSEKIGVPWIPVWTAASCSLCLHVYTDEIRSRFAEFDIAEKAEKTIDFIPGLSAISFSDLPEELIMEDSQSIFALTLHNMGLKLHKATAVAVNSFEEIDPIITNHLRSTNQLNILNIGPLQTLSSSIPPEDNECLKWLQTQKESSVVYLSFGTVINPPPNEMAALASTLESRKIPFLWSLRDEARKHLPENFIDRTSTFGKIVSWAPQLHVLENPAIGVFVTHCGWNSTLESIFCRVPVIGRPFFGDQKVNARMVEDVWKIGVGVKGGVFTEDETTRVLELVLFSDKGKEMRQNVGRLKEKAKDAVKANGSSTRNFESLLAAFNKLDS

SEQ ID NO: 51447 - protein, 114 aa, Zea mays
  misc_feature (7)..(7): Xaa can be any naturally occurring amino acid
  misc_feature (88)..(88): Xaa can be any naturally occurring amino acid
  unsure (1)..(114): unsure at all Xaa locations
TPLHNHXRVKNIYWWDKHNINLSKIYVLTQFNSASLNRHLSISYINNIAFYKNDPFIELLPPQHIPYNPNCFQRTPNTIHQYIWLFHXHNIIQFLILALYHLNPMYYQKFIQPH

SEQ ID NO: 51448 - protein, 223 aa, Zea mays
  misc_feature (16)..(16): Xaa can be any naturally occurring amino acid
  unsure (1)..(223): unsure at all Xaa locations
MAALLARQAAQALRAXQSAQLGPTTSAMQGHLRTYMNAGIPKRFKEEEEKEQLAKDIAKDWNAVFERSINTLFLTEVVRGLMLTLKYFFERNVTINYPFEKGPLSPRFRGEHALRRYESGEERCIACKLCEAICPAQAITIEAEEREDGSRRTTRYDIDMTKCIYCGFCQEACPVDAIVEGPNFEFATETHEELLYDKEKLLENGDRWETEIAENLRSESLYR

SEQ ID NO: 51449 - protein, 604 aa, Neurospora crassa
MATSYTLPASTYPQHHHLASDHLRSHGHGHDHCDHSHSHSHGHSHDHSHGHAHSHTPPSLPSLSSLDSPPSRRGSYATGAHSHKKTQSNDYNYSYTHNHNHNHDHEHDHDHSHDHSHDHDHDHDHAHDHAHNHSPGAGGTGHTKTRPNIPPLGAIKHFRTGSTAGGRPIITPTTAGFEKGHGFEPPATATSHGHHHHSAEWSKFTAFLLPYTSKYPIIHAVMTEKDSRRIFYFMSINLSFMAVQAFYGYVTDSLGLLSDSIHMFFDCVALAVGLVAAVASKWPPSERFPYGFGKIETLSGFANGVFLVLISVEIMFEAIERMMEGRETKRLGELFVVSTMGLLVNLVGMAAFGHHHHGHDHGHGHSHGSSCGGSGHSHSHSHSHSDSDAHGHSHSHGHSHSHSHDHKHDHKHDHGHSHGHSHGGHSHSHDNENMHGIYLHVLADTLGSAAVIVSTILTHFVPWSGWDPLASFLIAVLILLSSLPLVISSARRLLLTIPPETEYNLRETLSGISGLRGVAGYSVPKFWIDDRNSGEESSANMLLGVMHVQAVRGADMEDVRDRVRNYLLGHHIDITLQVEREGESSCWCGAGRSPLSQSQSTNQF

SEQ ID NO: 51450 - protein, 451 aa, Arabidopsis thaliana
MEPWIDELTDDLQSVSFTSAGTTVNRSTSSGSRSSSSAAALTPAPSAHGSFSSSKLPPSLRSSLSLSDLRFRLRLGSGDIGSVFLAEFKSLTAVTETTAVKLPLLAAKVMDKKELASRSKEGRAKTEREILESLDHPFLPTLYAAIDSPKWLCLLTEFCPGGDLHVLRQKQTHKRFHESAVRFYVSEVIVAIEYLHMLGIVYRDLKPENVLVRSDGHIMLTDFDLSLKCDESTSTPQIVLNRNNLPNGSSDQNENQGMDHRQTTSSSCMIPNCIVPAVSCFHPRIRRRKKKTDHRNNGPELVAEPVDVRSMSFVGTHEYLAPEIVSGEGHGSAVDWWTLGIFMFELFYGTTPFKGMDHELTLANIVARALEFPKEPTIPSAAKDLISQLLAKDPSRRLGSSLGATAVKRHPFFQGVNWALLMCTRPPFLPPPFRKELLSDDICPETHVDYY

SEQ ID NO: 51451 - protein, 644 aa, Oryza sativa
MWRGCVSRGLRSLSKGKGSSSSAPVSAAARLFSTASVVPSIPRPQLIRATSSYTVVDHSYDAVVVGAGGAGLRAAIGLSEHGFNTACITKLFPTRSHTVAAQGGINAALGNMTEDDWRWHMYDTVKGSDWLGDQDSIQYMCREAPKAVIELENYGLPFSRTEDGKIYQRAFGGQSLDFGKGGQAYRCACAADRTGHAMLHTLYGQAMKHNTQFFVEYFALDLIMDSEGTCQGVIALNMEDGTLHRFRATNTILATGGYGRAYFSATSAHTCTGDGNAMVARAGLPLQDLEFVQFHPTGIYGAGCLITEGSRGEGGILRNSEGERFMERYAPTAKDLASRDVVSRSMTMEIREGRGVGPLKDHIYLHLNHLPPEVLKERLPGISETAAIFAGVDVTKEPIPVLPTVHYNMGGIPTNYHGEVVTMKGDNPDSVVPGLMAAGEAACASVHGANRLGANSLLDIVVFGRACANRVAETAKPGEKQKPLQKSAGEKTIAWLDKLRNANGSLPTSKIRLNMQRVMQNNAAVFRTQETLEEGCKLITKAWESYHDVKISDRSLIWNSDLIETIELENLLINACITMHSAEARKESRGAHAREDFTKRDDEQWMKHSLGYWENENVLLAYRPVHMNTLDSEVESFPPKARVY

SEQ ID NO: 51452 - protein, 267 aa, Bacillus subtilis subsp. subtilis str. 168
MFKLDLQPSEKLFIPFITAGDPVPEVSIELAKSLQKAGATALELGVAYSDPLADGPVIQRASKRALDQGMNIVKAIELGGEMKKNGVNIPIILFTYYNPVLQLNKEYFFALLRENHIDGLLVPDLPLEESNSLQEECKSHEVTYISLVAPTSESRLKTIIEQAEGFVYCVSSLGVTGVRNEFNSSVYPFIRTVKNLSTVPVAVGFGISNREQVIKMNEISDGVVVGSALVRKIEELKDRLISAETRNQALQEFEDYAMAFSGLYSLK

SEQ ID NO: 51453 - protein, 429 aa, Methylococcus capsulatus str. Bath
MSNFAKLELNESVVEVPVIEGTEGEKAIDITKLRAQTGYITLDPGYGNTGSCLSAITFIDGEQGILRYRGIDIAELCEKSTFVEVSYLLIYGQLPTVEQYARFKEKIHHHSLIHEDMKSFFTSYPGHAHPMAILSSMVCSLSVYHPELLKPDQTIDERDETISRLLSKVRVLAAFAYKRSVGEAFVYTRPELDYISNFLHMMFTRPMRGYVPDELIRKVLDVLFILHADHEQNCSTSTVRMVGSSKANLFAAISAGICALWGPLHGGANQAVIEMLEEIHRAGGCYKKYIERAKDKNDPYRLMGFGHRVYKSYDPRAQILKKYCDEVLNYLGIDDPILEIAKGLEEVALTDPYFIERKLYPNVDFYSGIIYRALKIPTNMFTVMFALGRLPGWIAHWKEMLEDPGMRIARPRQIYIGERQRPYVPIAQR

SEQ ID NO: 51454 - protein, 447 aa, Methanosarcina acetivorans C2A [sequence omitted]

SEQ ID NO: 51455 - protein, 110 aa, Xylella fastidiosa Ann-1
MSFAVLGFPSNDFKGQEPGDEQQIQKFCTLTYGVKFPMFQKVHVKGDEVTPLYQRLTQTTGVAPGWNFHKYLIARDGHVVAQFDSRTRPDDPILLEAIKRELAKPVQVVH

SEQ ID NO: 51456 - protein, 385 aa, Methanosarcina acetivorans C2A
MTDREQFFRDVNKIVIKIGTSSITRKGCDHTKENCNIDPAFMESIAAQVYELRKHGKEVILVSSGAIGVGLNELGIAPKPREIPIRQAAAAVGQSILMQDWSRAFSKYGMKVAQILLTYEFYSDRVTYLNLRNSISTLLEYEVVPIINENDCTCTNEIEAIFGDNDKLSAMVASKIDADLLIILSDIDGLFDRNPKTHSDAKLLTLIKKITPEIESYGGDPTNFKGVGGMRTKIKAAKICSMAGCYVVIANSEIEDVVTKILSGEEIGTLFLAERHIQKNRARWIILARASGTVRVDAGAKAAVLGKNSLLPAGIVDIEGTFDRGDVVKLECEGKVFAKGITNYTSKELIKIKGAQTNQIDNILGYNNYDNVIKKENIGILEGIN

SEQ ID NO: 51457 - protein, 640 aa, Leuconostoc mesenteroides subsp. mesenteroides ATCC 8293
MKTSSLSTETIQSLRLLSNQMISKAGSGHPGIALGAAPILYELYANQLNVDPENPNMINRDRFVLSAGHGAALLYATLHAAGFDLSAQDLSEFRQPHSKTPGHPEVGVTPGVEATTGPLGQGLGMAVGMAMAEAKLNNQFPSVIDHFTFALVGDGDLMEGVSHEVASLAGQQKLGKLVVLYDDNAVSLDGLKKRSDISNNLARFASYGWDIREVADGNDLEAIHDAIENAKMSPEPTLIAVKTIIGDFGPFAGTNKAHGTPLDSQQLQDLSSALDVDIQNFELPSNLLEDLRAKISNRLLHQKQPLNDELTDYLQFSTKNTVTIPELPTDLKVQAGRKISKYVLQNFATQLPQLWGGSADLVASTNAEVVASPLFNADDRSGRNIAFGVREFGMGAVMNGIALHGGTKVFGATFLAFSDYMKAAIRLSALQHVPSIYVFTHDSITVGEDGPTHQPVEQLMGLRLIPGVDVLRPGTAEEIASAWQRALTSTDRPTILILSRGEIGAQGSTDQAKQSFENGAVQIRHHDEAKINLIATGSEVQIAQKVSELLSLPSNVVSMPNLSRFLALDDDKKQQIIPETGTKNVIIEAGTTLGWQGIAGNDGVIFGIDEFGMSAAAQIALDEFGFNAEDIVDKITQELQ

SEQ ID NO: 51458 - protein, 408 aa, Lactococcus lactis subsp. lactis Il1403
MAKANIGKLLLTGVVGGAIALGGSAIYQSTTNQSANNSRSNTTSTKVSNVSVNVNTDVTSAIKKVSNSVVSVMNYQKDNSQSSDFSSIFGGNSGSSSSTDGLQLSSEGSGVIYKKSGGDAYVVTNYHVIAGNSSLDVLLSGGQKVKASVVGYDEYTDLAVLKISSEHVKDVATFADSSKLTIGEPAIAVGSPLGSQFANTATEGILSATSRQVTLTQENGQTTNINAIQTDAAINPGNSGGALINIEGQVIGITQSKITTTEDGSTSVEGLGFAIPSNDVVNIINKLEADGKISRPALGIRMVDLSQLSTNDSSQLKLPSSVTGGVVVYSVQSGLPAASAGLKAGDVITKVGDTAVTSSTDLQSALYSHNINDTVKVTYYRDGKSNTADVKLSKSTSDLETSSPSSSN

SEQ ID NO: 51459 - protein, 232 aa, Zea mays
  misc_feature (121)..(121): Xaa can be any naturally occurring amino acid
  unsure (1)..(232): unsure at all Xaa locations
MAALAASSTAAFAAKPRLPRARLTVACSATGGDGNGSSSSVSLASSVKTFSAALALSSVLLSSAATSPPPAAADIAGLTPCKESKAFAKREKNSIKKLTASLKKYAPDSAPALAINATIEXTKRRFENYGKFGLLCGADGLPHLIVSGDQRHWGEFVTPGLLFLYIAGWIGWVGRSYLIAISGEKKPAMREIIIDVELATRLLPRGFIWPVAAYRELINGDLVVDDKDIGYY

SEQ ID NO: 51460 - protein, 501 aa, Arabidopsis thaliana
MFYYVIVLPLALFLLANKLFFTSKTKRFNLPPSPPYSLPILGHHNLLKPPVHRLFHRLSKTHGPIFSLQFGSRRAVVISSSSLATQCFTGQNDIILSNRPCFLTAKYVAYNYTTVGTAPYGDHWRNLRRICSLEILSSNRLTNFLHIRKDEIHRMLTRLSRDVKKEIELEPLLSDLTFNNIVRMVTGKRYYGDEVHNEEEANVFKKLVADINDCSGARHPGDYLPFMKMFGGSFEKKVKALAEAMDEILQRLLEECRRDKDGNTMVNHLLSLQQNEPEYYTDVTIKGLMLGMMIAGTDTSAVTLEWAMSSLLNHPEALEKAKLEIDEKIGQERLIDEPDIANLPYLQNIVSETFRLYPAAPLLVPRSPTEDIKVGGYDVPRGTMVMVNAWAIHRDPELWNEPEKFKPERFNGGEGGGRGEDVHKLMPFGNGRRSCPGAGLGQKIVTLALGSLIQCFDWQKVNGEAIDMTETPGMAMRKKIPLSALCQSRPIMSKLQAHLKG

SEQ ID NO: 51461 - protein, 338 aa, Xylella fastidiosa Ann-1
MSVALSIDLSKKKTILCFGEALIDMLAQPPVKKGMPRAFLQCAGGAPANVAVAVARLGGAVQFVGMLGSDMFGDFLFDSFAEAGVVTDGIVRTSTAKTALAFVALDAHGERSFSFYRPPAADLLFRAEHFQDASFSDALIFHACSNSMTDADIAEVTFEGMRRAQAAGAIVSFDLNFRPMLWPNGENPASRLWKGLSLADVVKLSSEELDYLANTLAADANAVIQQLWQGRAQLLLVTDAAGPVHWYTRTAGGQVPTFRVQVQDSNAAGDAFVGGMLYTFAQQFDDAAALIDFCHDPESIVSTLRFAAAVGALAVTRQGAFTAMPMLSEVLSLIQEQS

SEQ ID NO: 51462 - protein, 289 aa, Saccharomyces cerevisiae
MSNESNDLEKNISHLDPTGVDNAYIPPEQPETKHSRFNIDRDTLRNHFIAAVGEFCGTFMFLWCAYVICNVANHDVALTTEPEGSHPGQLIMIALGFGFSVMFSIWCFAGVSGGALNPAVSLSLCLARAISPARCVVMWFPQIIAGMAAGGAASAMTPGKVLFTNALGLGCSRSRGLFLEMFGTAVLCLTVLMTAVEKRETNFMAALPIGISLFMAHMALTGYTGTGVNPARSLGAAVAARYFPHYHWIYWIGPLLGAFLAWSVWQLLQILDYTTYVNAEKAAGQKKED

SEQ ID NO: 51463 - protein, 383 aa, Oryza sativa (japonica cultivar-group)
MAPSSSSCHDAAASMLLCAEDNSSILWLEDEEGEVGERRSGGCRSMVGDLAAGGGGGSGGGGVEEEEDMFPRQSEECVASLVEREQAHMPRADYGERLRGGGGDVDLRVRSEAIGWIWEVYTYYNFSSVTAYLAVNYLDRFLSQYELPEGRDWMTQLLSVACLSIAAKMEETVVPQCLDLQIGEPRFLFEVETIHRMELLVLTNLNWRMQAVTPFSYIDYFLRKLNSGNAAPRSWLLRSSELILRIAAGTGFLEFRPSEIAAAVAATVAGEATGVVEEDIAEAFTHVDKGRVLQCQEAIQDHHYSMATINTVQPKPASTRRGSASASSSSVPESPVAVLDAGCLSYKSDDTDAATIASHGGGRRKSCFDSSPVTSKKRRKLSR

SEQ ID NO: 51464 - protein, 168 aa, Lotus corniculatus var. japonicus
KSMYITWGAQHAIMQGDDLQLVLDQTSGSAAQTKKAFLFGTIENRIKLVPGNSAGIVTAYYLSSTGSQHDEIDFEFLGNISGQPYIVHTNIYTQGNGSREQQFYLWFDPTADFHNYTIHWNPTEVVWYVDSIPIRVFRNYENEGIAYPNKQGMRVYTSLWNADDWATR

SEQ ID NO: 51465 - protein, 546 aa, Cuphea pulcherrima
MPAASSLLASPLCTWLLAACMSTSFHPSDPLPPSISSPRRRLSRRRILSQCAPLPSASSALRGSSFHTLVTSYLACFEPCHDYYTSASLFGSRPIRTTRRHRRLNRASPSREAMAVALQPEQEVTTKKKPSIKQRRVVVTGMGVVTPLGHDPDVFYNNLLDGTSGISEIETFDCAQFPTRIAGEIKSFSTDGWVAPKLSKRMDKFMLYMLTAGKKALTDGGITEDVMKELDKRKCGVLIGSAMGGMKVFNDAIEALRISYKKMNPFCVPFATTNMGSAMLAMDLGWMGPNYSISTACATSNFCIMNAANHIIRGEADVMLCGGSDAVIIPIGMGGFVACRALSQRNSDPTKASRPWDSNRDGFVMGEGAGVLLLEELEHAKKRGATIYAEFLGGSFTCDAYHMTEPHPDGAGVILCIEKALAQSGVSREDVNYINAHATSTPAGDIKEYQALIHCFGQNRELKVNSTKSMIGHLLGAAGGVEAVSVVQAIRTGWIHPNINLENPDEGVDTKLLVGPKKERLNVKVGLSNSFGFGGHNSSILFAPYI

SEQ ID NO: 51466 - protein, 565 aa, Ustilago maydis 521
MENTKTQEVDVGLQADIKREKTNEHVKAANPGQLEKQVSPNSDLAVRPDSEAVDDMYERKVYILNKVLNEHIGMGKVQWQLFLLSGWGWMADNLWLQGVAIILPQVSREFNIQSNIRWMTFALYCGLICGAAIWGVLADVIGRRPSFNITLCIAGIFGIAAGGAPNFVGLGGLLAALGFGLGGNLPVDGMMFLEFIPANRQYLLTLLSVFWALGQLLASLVAWAFIANYSCDGYESNTPGTNTVPCDVSRNMGWRYTFYTLGALTFVMFIARFFVFRLPESPKFYLSKGMDAEAVAVLKEIARRNGKPLGDDIISVEIFRSAAGQEADMDVRSVEDEPTGFKAIISAPRRMLKSFEHVSFTPDLSHVRPLFYGWRMATTTTILWILWSLIGLAYPLYNAFLPIYLSEAQGVEDTSSVDTTYRNYAIISICGIPGSIIAAWLVELPRSGRRGALGIGTILTGVFLFLFTTASNEGAVLGFNCAAAVVQNIMYGVLYCITPEVLPAPHRGTGDGIAAALNRIFGAMAPIIGIYAGGTAPLYVAASLFLFSGVLAFFIPLESRGKSAL

SEQ ID NO: 51467 - protein, 322 aa, Halobacterium sp. NRC-1
MVRARHFDERALALQRRGWMPGYPPFKGQEGSQVGAAHALAGDDWLFPTYRSNAMQLARGVPASDLLLFRRGRAEFHSDHDHNVFPQAVPIASQIPHAVGAGMAMSYTDSGQASLAYFGDGATSEGDFHQGMNFAGVFDAPVVFFCENNNWAISLPRERQTASDSIAAKADAYGFEGVQVDGNDPLAVYETVTDALAGARDGTPILVESLTYRQGAHTTSDDPDRYRPEEEDLPAWRTADPVDRYADYLHDQGVIDAGFVEECFDAAADEIDDAVETAEAAGAPAVDELFDHVYAERTPRIDDQKAWLESWLETHDPQEMEF

SEQ ID NO: 51468 - protein, 534 aa, Cuphea hookeriana
MATASCMVASPFCTWLVAACMPTSSDNDPRSLSHKRLRLSRRRRTLSSHCSLRGSTFQCLDPCNQQRFLGDNGFASLFGSKPLRSNRGHLRLGRTSHSGEVMAVAMQPAQEVSTNKKPATKQRRVVVTGMGVVTPLGHDPDVYYNNLLDGISGISEIENFDCSQFPTRIAGEIKSFSTDGWVAPKFSERMDKFMLYMLTAGKKALADGGITEDAMKELNKRKCGVLIGSGLGGMKVFSDSIEALRTSYKKISPFCVPFSTTNMGSAILAMDLGWMGPNYSISTACATSNFCILNAANHIIKGEADMMLCGGSDAAVLPVGLGGFVACRALSQRNNDPTKASRPWDSNRDGFVMGEGAGVLLLEELEHAKKRGATIYAEFLGGSFTCDAYHMTEPHPEGAGVILCIEKALAQSGVSREDVNYINAHATSTPAGDIKEYQALAHCFGQNSELRVNSTKSMIGHLLGGAGGVEAVAVVQAIRTGWIHPNINLEDPDEGVDAKLLVGPKKEKLKVKVGLSNSFGFGGHNSSILFAPCN

SEQ ID NO: 51469 - protein, 538 aa, Cuphea lanceolata
MAAASSMAASPFCTWLVAACMSTSFENNPRSPSIKRLPRRRRVLSHCSLRGSTFQCLVTSHIDPCNQNCSSDSLSFIGVNGFGSKPFRSNRGHRRLGRASHSGEAMAVALQPAQEVATKKKPAIKQRRVVVTGMGVVTPLGHEPDVFYNNLLDGVSGISEIENFDSTQFPTRIAGEIKSFSTDGWVAPKLSKRMDKLMLYLLTAGKKALADAGITDDVMKELDKRKCGVLIGSGMGGMKLFYDALEALKISYRKMNPFCVPFATTNMGSAMLAMDLGWMGPNYSISTACATSNFCILNAANHIIRGEADMMLCGGSDAVIIPIGLGGFVACRALSQRNNDPTKASRPWDSNRDGFVMGEGAGVLLLEELEHAKKRGATIYAEFLGGSFTCDAYHMTEPHPEGAGVILCIEKAMAQAGVSREDVNYINAHATSTPAGDIKEYQALAHCFGQNSELRVNSTKSMIGHLLGAAGGVEAVTVIQAIRTGWIHPNLNLEDPDKAVDAKFLVGPEKERLNVKVGLSNSFGFGGHNSSILFAPYN

SEQ ID NO: 51470 - protein, 136 aa, Glycine max
SASISRFRLFCAFFPPEIHKFVEVRGSICPSMDSARDASGVAGTVLIPMRFVWPYGGRSVYLSGSFTRWSELLQMSPVEGCPTVFQVIHSLVPGHHQYKFFVDGEWRHDDLQPCESGEYGIVNTVSLATDPNILPV

SEQ ID NO: 51471 - protein, 416 aa, Photorhabdus luminescens subsp. laumondii TTO1
MSKRRVVVTGLGMLSPVGNTAESSWKAVCAGQSGISLIDHFDTSHHATKFAGLVKGFNHEDFNISRKDARKMDDFIQYGIAAGVQAIEDSGIEVTEANASRFGAAIGSGIGGLGLIEENHGALVASGPRKISPFFVPSTIVNMVAGHLSIIYGLRGPSISIATACTSGVHNIGHAARIIAYNDADIMLAGGAEKASTPLGVGGFGAARALSTRNGNPQGASRPWDKDRDGFVLGDGAGILVLEEYEHAKRRGAKIYAEIVGFGMSSDAYHMTSPPENGAGAALAMENALRDAGITTKQVGYINAHGTSTSAGDLAEAHAVESVFGEGTDVLVSSTKSMTGHLLGAAGAVESIFTILALRDQVVPPTINLENQDENCRLDFVPNESRKVEGMEYALCNSFGFGGTNGSLIFRKIKPD

SEQ ID NO: 51472 - protein, 164 aa, Methylococcus capsulatus str. Bath
MNIYEFEVRTLEGETVRLDGYRGKVLLIVNVASRCGFTPQYAGLEALYRRHRNAGLVILGFPCNQFGGQEPGSETEIRRFCSSRYEVSFPLFAKIEVNGEHTHPLYAYLKSAQPGLLGSEAIKWNFTKFLVGRNGEVVKRYAPTATPESIEPGLLPLLTVGSGG

SEQ ID NO: 51473 - protein, 708 aa, Neurospora crassa
MVLPYKSNTTATLTHPTALSPPPAPASPKLKLEKTHMRLRSDSALSMHTSKSSFRQYPNSRPESPMTSPWYWKKQRDVDAVSTIDTISLGGTTSVASSEYAQYVGSLPNLFDRTVIKIAFSDPEVGRKLRDFAKPRNYSVDVGLMLEAEQYTGALDTLRSLINHITTYLEAPARSSIEPAYTYPLAFKTNTKQCARSALPSLERLYREAKFAAEERLINDLYPEFVKSQLANRLKTCLSVTQPSSSSPFKSTYPGLGNAFCLTDSWKPDNPIVYASEGFLRMFGFERHEILQQNCRCMQGNSTNGDAINISKGMGTSHQEIMDLLNFDTPTEENSLPSTPTESYVGSAQRPAKHIQDSCPPDENPPVTPRRSHRQRLFDRFRPRKNVLDTSHEERQPDDPTILTNARKSPSPSPTDGYMENWGNSNPFHDHYQVEPQPPKPTPISTPYSCFFVMRYVPSPSTSFHIFPHQTNDKRHSRLPHLPVAFCSTEALGFLGLRGHDSSIVQSRSIFSLLVCATSSTDLIEKTFRSTVLESMAAGESISLEISTLAHDPAPSTTTPSPSRDTKTADKPPSLFSSARARSRSNVGREGRTAATRDGALSAASSDYRPSSSRVFSDKLKEHGAVERLGNMFAFRGLGGGGGGGKDAASVSKVEEQGGKGHPGQGQEQQTKGRRLVSHWTALKDGEGKVAWVVLILTPATAAAASSA

SEQ ID NO: 51474 - protein, 149 aa, Bacillus subtilis subsp. subtilis str. 168
MMEKTFIMVKPDGVQRQLIGDILSRFERKGLQLAGAKLMRVTEQMAEKHYAEHQGKPFFGELVEFITSGPVFAMVWEGENVIEVTRQLIGKTNPKEALPGTIRGDYGMFVGKNIIHGSDSLESAEREINIFFKNEELVSYQQLMAGWIY

SEQ ID NO: 51475 - protein, 225 aa, Zea mays
PYPIHCPLTFSPSCTAELPDHRAITLKEQVSSTEIPVRLKSGSPLCSACEDFTGKAVSYISEKQTQDKVMGFLHDACSQSFSFEQKCDELMDSYATLLFAKITEIKPEAFCKRYGLCRGTALFSGVTSDSTCVFCHHLLDEVMSKLKDPDAEFEIIQILIKECNKIEGHVQQCKRLVLQYIPLILVNGEKFLEKNDVCALVQACPATHKRTFSSALKEALLLSDA

SEQ ID NO: 51476 - protein, 1121 aa, Ralstonia eutropha JMP134
MKRLTEPANALLLNADPLWYKDAVVYQLHIKSFYDANGDGVGDFAGLLAKLDYLVDLGIDTIWLLPFYPSPRRDDGYDIADYRNVHPDYGTLAEARRFVGAAHARGIRVITELVINHTSDQHPWFQRARKAKPGSAARRYYVWADNDQAYAGTRIIFCDTEKSNWSWDPVAGAYFWHRFYSHQPDLNFDNPQVMNEVLSVMRFWLDIGVDGLRLDAVPYLVEREGTTNENLPETHTAIRHIRSHLDSHYQGRVLLAEANMWPEDAQQYFGRSSTGDKGDECHMAFHFPLMPRMYMAIAREDRFPITDIMRQTPELPTDCQWAIFLRNHDELTLEMVTSSERDYLWEVYASDRRARINLGIRRRLAPLMERDRRRIELMNSLLFSMPGTPVIYYGDEIGMGDNIHLGDRDGVRTPMQWSPDRNGGFSHADPERLVLPPLQGPLYGYEAVNVEAQARDPHSLLNWMRRMLALRRKHRAFGRGTLRFLFPGNRKILAYLREYEGEHILCVANLSRAPQAVELDLSAFNGRVPVEMMGATPFPAIGTLTYLLTLPPYGFYWFVLSEDAHPPAWHVSAPEQMPDQITLVLQNKGRPELTEAARRMLNDEVLPPYIRRRRWFGAKDDSIQRATLAYMAPFTKGTTGEEIYLGEVEVRLSGGRTERYQLPLGVLWDRESADSVSQLAHGLSMARVRQGSRVGLATDGFVLEPFAREVIRALRADAELQGPQETIRFRSEPGLSAVQPEQEEIQWMSAEQSNSSLAYNNTAVLKLVRRLSGGTHPEVEMTRYLTAQGYPHSPPLLGEVVRTGADGVPHTLMMVQGYILNQGNGWDWTLDYLSRVIDDALPAQESADEFAEAMNGYATMAGTLGRRLAELHAVLARPTDDPAFAPRPATDAETRQWAEQAMAAITHALALLEKRAQNDPKSASKRFMADVDTLLKARDALPALVNRLAAAAPGSLQTRFHGDFHLGQVLIAQNDTYLVDFEGEPGQPLDWRRRKTSPLRDVAGLLRSIDYAAATVGTDRQERTHAELPPALAERRGGLLERFRETASDAFLGCYRRHMEASGTPWADNAQFQPLLDLFLLERAAYEVEYEAANRVAWIDLPASGLARMVRKLMAGNLEAQ

SEQ ID NO: 51477 - protein, 404 aa, Thermus thermophilus HB8
MNLGRSFVGFLVLSLMAGAVLWWGVSNGQAPSSQAAKAADEGLLEYERNTVEIVERYGDGVVYVSVVTRPQSVQLPPGFEFFAPFLQVPPQRGTGSGFVIDKEGYIFTNYHVVEGADRITVKFHNDPKEYQARLVGAAPPLDVALLKVDAPKERLVPLVLGDSDQIRVGQKAIAMGNPFGLEFTVTQGIVSAIRENPGAIGDESGLVPQVIQTDAAINPGNSGGPLLNSRGEVIGINTAILTPTGQFGAAQFAGVGFALPINLVKQYLPEMRAGKILTAEEIVRSRPRLGVSIIPLSFYPERLRQQYGLPDTGLMVQEVERNSPAQKAGLKPPTRFAYIQLPTGEALQVGVDGDVLLEADGVPLTSIAQLRQVLYAKKPGEAVTLKVWRQGRTLTLRVVPQVLR

SEQ ID NO: 51478 - protein, 320 aa, Streptomyces avermitilis MA-4680
MSPRQITVLGECVADAFTEPANASNELALRVLPGGGPANTAVALARLGTPARFLARLSGDVFGRLFRAHLEESGVDLSYAVAAAEPSTLAVAELDATGQAAFSFHAQNTADWQWTPGELAGVDLSETACVHTGSLALVREPGGAAVEEFLAAAAPRATISIDPNVRPLLVRPEVYRARLAHWCALADILRLSEDDLELLLPGTPPEQACDIWHAAGVRLVVITLGAGGALASLDGERLRVPAVATRVVDTVGAGDSFTAGLLHHLGARGLLGGRLTDLGLDEVAEACRFGARVAALTCSVAGPNPPWRDQLAQLTTAGGA

SEQ ID NO: 51479 - protein, 210 aa, Alkalilimnicola ehrlichei MLHE-1
MPELKDLLANNQAWAERKQREDPAFFQRLAREQKPEYLWIGCSDSRVPASEIVDMPPGELFVHRNIANVVTHADVNCLSVLQYAVDVLKVRHIIVCGHYGCGGVKAALSNQYVGFVNNWLRHIEDVYHLNEGQFRDLPEERQVDLLCELNVQQSVRNVCRSTVVQQAWQRGQPLSVHGWIYGLASGRLKDLGLHFHGPECLPVIDRLAMD

SEQ ID NO: 51480 - protein, 93 aa, Brassica napus
  misc_feature (44)..(44): Xaa can be any naturally occurring amino acid
  misc_feature (64)..(64): Xaa can be any naturally occurring amino acid
  unsure (1)..(93): unsure at all Xaa locations
NPRVENRFAPSKSRFHPSFLLVGTVELIEVIRAEFMTSSAFIFXYENRLFLIFRNCNVSVWNFXGELVISFNIMVDASGERKQIVIHKVVPFS

SEQ ID NO: 51481 - protein, 341 aa, Salmonella typhimurium LT2
MKALSKLKAEEGIWMTDVPEPEVGHNDLLIKIRKTAICGTDVHIYNWDDWSQKTIPVPMVVGHEYVGEVVGIGQEVKGFKIGDRVSGEGHITCGHCRNCRGGRTHLCRNTTGVGVNRPGCFAEYLVIPAFNAFKIPDNISDDLASIFDPFGNAVHTALSFDLVGEDVLVSGAGPIGVMAAAVAKHVGARHVVITDVNEYRLELARKMGVTRAVNVAKESLNDVMAELGMTEGFDVGLEMSGAPPAFRTMLDTMNHGGRIAMLGIPPSDMSIDWTKVIFKGLFIKGIYGREMFETWYKMAALIQSGLDLSPIITHRFSIDDFQKGFDAMRSGQSGKVILSWD

SEQ ID NO: 51482 - protein, 398 aa, Salmonella typhimurium LT2
MRGDFYKQLTNDLETARAEGLFKEERIITSAQQADITVADGSHVINFCANNYLGLANHPELINAAKAGMDSHGFGMASVRFICGTQDSHKALEQKLASFLGMEDAILYSSCFDANGGLFETLLGAEDAIISDALNHASIIDGVRLCKAKRYRYANNDMAELEARLKEAREAGARHVLIATDGVFSMDGVIANLKGVCDLADKYDALVMVDDSHAVGFVGENGRGSHEYCDVMGRVDIITGTLGKALGGASGGYTAARKEVVEWLRQRSRPYLFSNSLAPAIVAASIKVLEMVEAGAELRDRLWANARQFREQMSAAGFTLAGADHAIIPVMLGDAVVAQKFARELQKEGIYVTGFFYPVVPKGQARIRTQMSAAHTPEQITRAVDAFTRIGKQLGVIA

SEQ ID NO: 51483 - protein, 304 aa, Sulfolobus tokodaii str. 7
MLAIRLARGYTKREKILKFDGNYHGAHDYALINAGSAVSEFNVIISSGIPTSIINTVIVCKYNDLDCVEKHLRTEEIAGVIVEPVMGNMGVILPEQDFLNGLRELTKTYNSVLIFDEVITGFRLGLSGAQGYFKVIPDLTTLGKIIGGGLPIGAVTGKKEIMSNLTPEGKVFNAGTFNANPLTMAAGIATIEVLETTNAYDIANKASKEIAEELDNSLSKKNFKYTINRIQSMFQFFIGISKVTNADDARLANKDLYVKIHEKLLKLGVFIPPSQFETIFTSSSHSDEIVNLTIEAIHKVVSEI

SEQ ID NO: 51484 - protein, 159 aa, Triticum aestivum
  misc_feature (116)..(116): Xaa can be any naturally occurring amino acid
  unsure (1)..(159): unsure at all Xaa locations
MSLIPRGNAFDPFSPDLWDPFDGFPFGSGGSSSLFPSFPRISSETAAFAGARIDWKETPEAHVFKADVPGLKKEEVKVEVEDGNVLQISGERNKEQEEKTDTWHRVERSSGKFLRXRFRLPEDAKADQIKATMDNGVLTVTVPKEGAKKPEVKSIQISG

SEQ ID NO: 51485 - protein, 202 aa, Brassica napus
MKPPQKRGRKHKRQDASSAENGGGEVKDASLNESPLPLSPEPVSASETNPSPSRRNRGRGKKRRLNNQSEPTGGISQRSSLPQNGDCSNGRIVSGAMTSESIPAAPSWETVVKVVPSMDAVVKVFCVHTEPNFSLPWQRKRQYSSGSSGFIIGGRRVLTNAHSVEHHTQVKLKKRGSDTKYLATVLAIGTECDIALLTVNDD

SEQ ID NO: 51486 - protein, 261 aa, Glycine max
MAKNRGELRIHESVDELRTDLADYVAELSEASVKERGVFAIALSGGSLIGLMGKLCEAPYNKTVDWSKWYIFWADEHVVAKNHADSNYKLAKDGLLSKVPIVPSHVHSINDSVSAEEAADDYEFVIRQLVKTRVVSVSEISDCPKFDLILLGLGPDGHIASLFPNHSALNEREEWVTFITDFPKPPPERITFTLPVINSASNVAVVVTGESIAESVHLAIGDVGPDGPLIPARMVQPAMGKLVWFLDKLAASKLEDSNLNK

SEQ ID NO: 51487 - protein, 406 aa, Escherichia coli
MKRVVITGLGIVSSIGNNQQEVLASLREGRSGITFSQELKDSGMRSHVWGNVKLDTTGLIDRKVVRFMSDASIYAFLSMEQAIADAGLSPEAYQNNPRVGLIAGSGGGSPRFQVFGADAMRGPRGLKAVGPYVVTKAMASGVSACLATPFKIHGVNYSISSACATSAHCIGNAVEQIQLGKQDIVFAGGGEELCWEMACEFDAMGALSTKYNDTPEKASRTYDAHRDGFVIAGGGGMVVVEELEHALARGAHIYAEIVGYGATSDGADMVAPSGEGAVRCMKMAMHGVDTPIDYLNSHGTSTPVGDVKELAAIREVFGDKSPAISATKAMTGHSLGAAGVQEAIYSLLMLEHGFIAPSINIEELDEQAAGLNIVTETTDRELTTVMSNSFGFGGTNATLVMRKLKD

SEQ ID NO: 51488 - protein, 399 aa, Burkholderia vietnamiensis G4
MRDAFLAQVRGTLDQIRADGFYKTEREIASPQAAAVRLAGGAGVLNFCANNYLGLANDPRLIAAAKDGLDQDGFGMASVRFICGTQTVHKQLESALASFLGTEDSILYSSCFDANGGLFETLLDENDAVISDELNHASIIDGIRLCKAKRFRYKNNDLADLEAKLKEADAAGARHKLIATDGVFSMDGIIADLKGICDLADRYGALVMVDDSHAVGFIGAHGRGTPEHCGVDGRVDIITGTLGKALGGASGGYVAARREIVELLRQRSRPYLFSNTLTPSIAAASLKVLELLGSDEGAKLRERVRENGVRFREQMTAAGFTLVPGAHPIIPVMLGDAQLATNMADKLLAEGVYVIGFSFPVVPRGRARIRTQMSAAHTAEQIDQTVAAFVRVGKSLGIV

SEQ ID NO: 51489 - protein, 878 aa, Pseudomonas aeruginosa UCBPP-PA14
MPEIDARLREDVHQLGELLGDTIREQYGPRFLDKIELIRKGAKAARRGSAEGAQQLTATLDGLEEDELLPVARAFNQFLNLANIAEQYHRIRRRRPNEPEPFENLVLEELLGRLKDAGHAPGQLARQLAGLEIELVLTAHPTEVARRTLIQKYDAITAQLAAKDHADLLPEERSRIQQRLQRLVAEAWHTDEIRKVRPTPVDEAKWGFAVIEHSLWQALPNVLRHVDEVLLRSTGERLPLTAAPLRFASWMGGDRDGNPNVTASVTREVLLLARWMAADLYLRDIDRLAAELSMQQASPQLLARVGDSAEPYRALLKQLRERLRVTRNWTHQALAGEVPAAEGVLEHNRDLVEPLQLCHESLHACGMGVIADGALLDCLRRAATFGLFLVRLDVRQDSARHAAALSEITEYLELGSYDEWDEKTRLEFLLEELNSRRPLLPAHYQPSADTAEVLATCRAIAAAPPASLGSYVISMAGQPSDVLAVQLLLKESGVDWPMRVVPLFETLDDLDNAGPCMERLLTLPGYRSRLSGVQEVMIGYSDSARDAGTLTAAWAQYRAQEKLVEICRQQEVELLLFHGRGGTVGRGGGPAHAAILSQPPGSVAGRFRVTEQGEMIRFKFGLPDIAEQNLNLYLAAVLEATLMPPPAPEPAWRAQMDRLAKDALLAYRRVVRDDPQFVEYFRLATPEQELGRLPLGSRPAKRREGGVESLRAIPWIFAWTQTRLMLPAWLGWETALLNAIERGEGALLGQMREQWPFFTTRIDMLEMVLAKADADIARLYDERLVPLELRPLGRRLRDLLSQAVRVVLGLTGQSLLLAHASETRESISVRNSYLDPLHLLQAELLARSRRCQGDACGGLEQALLVTVAGVAAGLRNTG

SEQ ID NO: 51490 - protein, 401 aa, Guillardia theta
MQEDMEYNIRFVGSYILDKTLGVGATGKVKLAKHSRTKEKVGVKIIKKDLFYDKPSLRLKIQREISVMKLMFHPHVIKIYDVLEDSKYLFLIIEYASKGELFNYLVEKRKLENREALKFFHEIISGLEYCHKHRICHRDLKLENILLDMKLQIKIADFGMASLSIPNIMLKTFCGSPHYASPEVVSNEPYNGIKADIWSCGIILYALVVGKLPYDEENDNMRKLFNKIRFEPPRIPRIIHPDCRDLIRALLTINPQKRITIDKIKKHPWYKSSPLPESCRISIQNLSFASVQNPISNPDPEIISFLLPLQLVKDKKTLCGILSTKKPSFLRVLYRQLEWRKMKMDSVRSNLINEANFKRKKLFKQGKLGNITGLKYWKNLKCKFLSINIKSFVRTGIYIYF

SEQ ID NO: 51491 - protein, 271 aa, Streptomyces coelicolor A3(2)
MSGNVQLLNDTLAAAKSEGRAALIAYLPAGFPTVTGGIEAVKAALDGGADVVEVGLPHSDPVLDGPVIQTADDIALRGGVRIADVMRTVREAHEATGKPILVMTYWNPIDRYGVERFTAELAEAGGAGCILPDLPVQESALWREHADKHGLATVFVVAPSSRDARLAEITAVGSGFVYAASLMGVTGTRASVGAQAEDLVRRTRATTDTPVCVGLGVSNAAQAAEVAGFADGVIVGSAFVKRMLDAPDDAAGLEGVRALAADLAKGVRGQA

SEQ ID NO: 51492 - protein, 488 aa, Ustilago maydis 521
MGLSKETRILTLLVIDVVFFFIEIITGYAVGSLALVADSFHMLNDVMSLIVALWAVKLSTKSSDHRFSYGWQRAEILGALVNGVFLLALCFSIFMEAIQRFVNITEVSNPKLVIIVGSLGLASNLVGLLLFHDHGHAHGGHSHAHGSHSHAPHDHVHSHAVTDGSSNSNHAAHQDNTDAAASSKKTTMTNSASSDDITSGSPSAVRGRAREGSVGSILGHPAQTRAFVVQTAHDLGYEASGSRHQHSNSVTSVNGSNERSRLLANGSQDYGATGANADLEAAIGSSAARKNGHSHEHDSHADHDHDHDHADVADAHDAPGHAHAHGGGHSHGSMNMQGVFLHVLGDALGNVGVIAAGLFILYSDAWWRFYSDPAISFLITIIIFHSALPLCKSASYILLQGVPASVSLEAVRNSIMSVEGVLNLHELHVWQLSESKIVASVHVLVDCSSGQTEKYMNIAAKIRANLHGWGIHSSTIQPEFVPGGGRER

SEQ ID NO: 51493 - protein, 837 aa, Arabidopsis thaliana [sequence omitted]

SEQ ID NO: 51494 - protein, 201 aa, Brassica napus
  misc_feature (161)..(161): Xaa can be any naturally occurring amino acid
  misc_feature (166)..(167): Xaa can be any naturally occurring amino acid
  misc_feature (178)..(178): Xaa can be any naturally occurring amino acid
  unsure (1)..(201): unsure at all Xaa locations
MNILNRFGLGSGGQTSTDPSPIAQGSDDDSPAPGNHFAQFAAGCFWGVELAFQRLPGVTQTEVGYTQGITHNPSYEDVCSETTRHAEVVRVQYDPKGCTFESLLDLFWSRHDPTTLNRQGNDVGTRYRSGIYFYTPEQEKLARESLERHQQRMERKIMTEXLPAKXXYRAEEQQQQYXSKGGRYGMGQSCAKGCTDPIRCY

SEQ ID NO: 51495 - protein, 1262 aa, Neurospora crassa
MNNNYYGSPLSPEELQHQMHQHQQQQQQQQQQQQQQQQQQQQQQQQQQQQHQHQQQQKTNQHRNAGMMNTPPTTNQGNSTIHASDVTMSGGSDSLDEIIQQNLDEMHRRRSVPQPYGGQTRRLSMFDYANPNDGFSDYQLDNMSGNYGDMTGGMGMSGHSSPYAGQNIMAMSDHSGGYSHMSPNVMGNMMTYPNLNMYHSPPIENPYSSAGLDTIRTDFSMDMNMDSGSVSAASVHPTPGLNKQDDEMMTMEQGFGGGDDANASHQAQQNMGGLTPAMTPAMTPAMTPGVSNFAQGMATPVSQDAASTPATTFQSPSLSATTQTIRIGPPPPPSVTNAPTPAPFTSTPSGGGASQTKSIYSKSGFDMLRALWYVASRKDPKLKLGAVDMSCAFVVCDVTLNDCPIIYVSDNFQNLTGYSRHEIVGRNCRFLQAPDGNVEAGTKREFVENNAVYTLKKTIAEGQEIQQSLINYRKGGKPFLNLLTMIPIPWDTEEIRYFIGFQIDLVECPDAIIGQEGNGPMQVNYTHSDIGQYIWTPPTQKQLEPADGQTLGVDDVSTLLQQCNSKGVASDWHKQSWDKMLLENADDVVHVLSLKGLFLYLSPACKKVLEYDASDLVGTSLSSICHPSDIVPVTRELKEAQQHTPVNIVFRIRRKNSGYTWFESHGTLFNEQGKGRKCIILVGRKRPVFALHRKDLELNGGIGDSEIWTKVSTSGMFLFVSSNVRSLLDLLPENLQGTSMQDLMRKESRAEFGRTIEKARKGKIASCKHEVQNKRGQVLQAYTTFYPGDGGEGQRPTFLLAQTKLLKASSRTLAPATVTVKNMSPGGVPLSPMKGIQTDSDSNTLMGGMSKSGSSDSTGAMVSARSSAGPGQDAALDADNIFDELKTTRCTSWQYELRQMEKVNRMLAEELAQLLSNKKKRKRRKGGGNMVRDCANCHTRNTPEWRRGPSGNRDLCNSCGLRWAKQTGRVSPRTSSRGGNGDSMSKKSNSPSHSSPLHREVGNDSPSTTTATKNSPSLRGSSTTAPGTITTDSGPAVASSASGTGSTTIATSANSAASTVNALGPPATGPSGGSPAQHLPPHLQGTHLNAQAMQRVHQHKQHQQHQQQHQQQHQQQHQQQHQQLQQHQFNPPQSQPLLEGGSGFRGSGMEMTSIREEMGEHQQGLSQQLQDQGRCQTHRLGQQQQKQQQQQEGEQQQHKEHSSTSLPSQRQRLHKELSTTTSCRTAKEVATAAANANTAAAAGAAVRVTTPIITDRRTERRY

SEQ ID NO: 51496 - protein, 454 aa, Agrobacterium tumefaciens str. C58
MEKFTKMGPMTTTSETERYPRIALISTHGYVAAHPPLGAADTGGQVVYVLELARKLGQLGYTVDLYTRRFEDQPEFDEVDERVRVVRIPCGGRDFIPKEYLHRHLMEWCENALRFIKKNDLNYSFINSHYWDAGVAGQRLSEALKIPHLHTPHSLGIWKKRQMETDYPEKADTFELEFNFKERIQHELIIYRSCDMVIATTPVQLDVLIEDYGLKRKHIHMIPPGYDDNRFFPVSDATRQMIRQRFGFEGKVVLALGRLATNKGYDLLIDGFSVLAEREPEARLHLAVGGENMDEQETTILNQLKERVKSLGLEDKVAFSGYVADEDLPDIYRAADLFVLSSRYEPFGMTAIEAMASGTPTVVTIHGGLFRAISYGRHALFADPFDKEDLGITMMKPFKHERLYGRLSRMGAHKARSLFTWTGIAQQLLALVEGRTMMPVLEEADWAEPWNDGD

SEQ ID NO: 51497 - protein, 629 aa, Alkalilimnicola ehrlichei MLHE-1
MPAPATREGADRRIRRLRLYLVLALAGWTATFGGLSWWLVGHFQGLTVELAYQEARANFNKDQAFRFWGTLHGGVYVPVSDQTPRNPYLAHLPERDITTPGGQELTLMNPAYMLRQLNEQFGDLFGVRGNITSLDPLRPENAPDDWERDALEAFEDGVDERLEVAYIEQEPYLRYMAPMETDRGCLQCHAHQGYQVGDIRGGVSVAVPLSGYQAHEEVAMGRTLGAFAGIWLLGLLGLGYSGQRVLRDARFQHAATREIQRLNEGLEQRVRERTAELEQARQSAEEANRAKSVFLANMSHELRTPLNAILGFARLAGQAPQATPDQREQLGFVERNGEHLLSLINDVLDMAKIESGRQTLEEGVVDLPRTLEDAVEALRHRAEGKGLTLTLEVAEDLPRHILSDGRKLRQILINLVSNAVKYTDAGRVVLSARRQSAEPSGGHDGLLLAVADTGRGIPVEDQDRVFEPFVQSGRVGTTEGTGLGLPITREFVELMGGEIGLESTSGEGSRFTVSLPLVPAVDEERERQPAPRRHLGLNYRYAEGTPEPPAEVHPADRVPEDFGQRLQALPADQRRALAQALRAGDLDALEALVRDIGEQDAVLAPALRAQVQAFRYQEILTALNGGGGA

SEQ ID NO: 51498 - protein, 50 aa, Glycine max
RDNMHDVLVTFMAMRSDGTEVMVDNRYLKAYNPLLLINFYEMHLRYTPTA

SEQ ID NO: 51499 - protein, 349 aa, Yersinia pestis KIM
MYDLLKYVKFITIFWRRNTMKLAVYSTKQYDRKYLELVNKDFGFELEFFDFLLTPKTAKMAEGCQAVCLFVNDDGCREILTELATIGVKILALRCAGFNNVDLEAAKELGIQVVRVPAYSPEAVAEHTVGMMLSLNRRIHRAYQRTRDANFSLEGLIGFNMHNRTAGIIGTGKIGVATMRILKGFGMRLLAFDPYPSEQALELGAEYVDLKTLYAESDVISLHCPMTPENHHLLNKQSFDQMKDGVMIINTSRGGLIDSTAAIDALKQQKIGSLGMDVYENERDLFFEDKSNDVIQDDVFRRLSSCHNVLFTGHQAFLTEEALTSISVTTLQNIAQLDKGEPCPNIITL

SEQ ID NO: 51500 - protein, 200 aa, Glycine max
  misc_feature (43)..(43): Xaa can be any naturally occurring amino acid
  unsure (1)..(200): unsure at all Xaa locations
WVLGILGGKQAHLPTSKLFPLQQHLAQSSDGVKLRTRVFKPQXEADGNLGIVLLHPYSILGGCQALLNGYTAFTFDMRGVAKSTGFSQVKDVVAVCNCLSNTFSLPRILLLGSSAGAPIAGSAVDQIEQVIGYPSYSHQNHFIMGTQDGFTSVKQLRNKLNSAAGRVETHLIDGVGHFQMEGPGYDAEMVDLIIKFIASL

SEQ ID NO: 51501 - protein, 198 aa, Lycopersicon esculentum
MASNSAFSLFLILLIITQCLSVLNAAKDFDFFYFVQQWPGSYCDTKQSCCYPTTGKPAADFGIHGLWPNNNDGTYPSNCDPNSPYDQSQISDLISSMQQNWPTLACPSGSGSTFWSHEWEKHGTCAESVLTNQHAYFKKALDLKNQIDLLSILQGADIHPDGESYDLVNIRNAIKSAIGYTPWIQCNVDQSGNSQLYQ

SEQ ID NO: 51502 - protein, 233 aa, Lycopersicon esculentum
MMKSQKKLLIKIIVVQCLLVLCVTSQDFDFFYFVQQWPASYCDTRRSCCYPTTGKPDEDFSIHGLWPNYKDGKWPQNCDRESSLDESEFSDLISTMEKNWPSLACPSSDGLKFWSHEWLKHGTCSALNQHAYFQTALDFKTKSNLLQNLNNAGIKPRNGDYYGVESIKKAIEKGVGHTPFIECNVDSQGNHQLYQVYLCVDSSASKFIDCPIFPHGGKCGSKIEFPSFSTNDD

SEQ ID NO: 51503 - protein, 179 aa, Crocosphaera watsonii WH 8501
MLSCTRAIATQSRIIRLPVHVTEKLNKIKQVQRKISQSKNRNASLEEIGQELGMTAAQVREVLMKIPRSVSLEVKVGKEKDTELVDLLESEDISPEENLAVESLRRDIGVLLKDLTEREQQVIKLRYGFEDGVAYSLAGIGRVLELSRERVRQIEAKTLQKLRQPRRRNQIRDYFESLT

SEQ ID NO: 51504 - protein, 142 aa, Glycine max
  misc_feature (117)..(117): Xaa can be any naturally occurring amino acid
  unsure (1)..(142): unsure at all Xaa locations
GKNPPGEGFFPPTLVGGGLYTGDPPFGGGPLPPVGGGPKLIKAPPLGPQLFGVEGGSPPFGPRVKVFPPGVKLSGPMGSGGFPRKNGGENQNCLPFFKAMGVFPGPPFFFFRDGPLXGGFVGFGKGGLFGGIFRAPGVCVPF

SEQ ID NO: 51505 - protein, 338 aa, Bordetella parapertussis 12822
MKVFYDKDCDLSLVKGKTVAIIGYGSQGHAHALNLHDSGVKVVVGLRKGGASWNKAANAGLEVAEVAEAVKRADIVMMLLPDENIAAVYRDEVHANIKAGAALAFAHGFNVHYGQVVPREDIDVIMVAPKAPGHTVRSTYSQGGGVPHLIAVYQDKSGSARDVALSYASANGGGRAGIIETNFREETETDLFGEQAVLCGGTVELIKAGFDTLVEAGYAPEMAYFECLHELKLIVDLIYEGGIANMNYSISNNAEFGEYETGPKVVTDATRQAMRECLTAIQTGEYAKKFILENAAGAPTLTSRRRINAESQIEQVGGKLRAMMPWIAANKLVDKAKN

SEQ ID NO: 51506 - protein, 554 aa, Escherichia coli K12
MCSIFGVFDIKTDAVELRKKALELSRLMRHRGPDWSGIYASDNAILAHERLSIVDVNAGAQPLYNQQKTHVLAVNGEIYNHQALRAEYGDRYQFQTGSDCEVILALYQEKGPEFLDDLQGMFAFALYDSEKDAYLIGRDHLGIIPLYMGYDEHGQLYVASEMKALVPVCRTIKEFPAGSYLWSQDGEIRSYYHRDWFDYDAVKDNVTDKNELRQALEDSVKSHLMSDVPYGVLLSGGLDSSIISAITKKYAARRVEDQERSEAWWPQLHSFAVGLPGSPDLKAAQEVANHLGTVHHEIHFTVQEGLDAIRDVIYHIETYDVTTIRASTPMYLMSRKIKAMGIKMVLSGEGSDEVFGGYLYFHKAPNAKELHEETVRKLLALHMYDCARANKAMSAWGVEARVPFLDKKFLDVAMRINPQDKMCGNGKMEKHILRECFEAYLPASVAWRQKEQFSDGVGYSWIDTLKEVAAQQVSDQQLETARFRFPYNTPTSKEAYLYREIFEELFPLPSAAECVPGGPSVACSSAKAIEWDEAFKKMDDPSGRAVGVHQSAYK

SEQ ID NO: 51507 - protein, 425 aa, Thiobacillus denitrificans ATCC 25259
MDVKSYMQTLGRQAREASRAIARADTEQKNRALLTMAAAIRRDAARLLAANAQDMEHARAAGYDAALLDRLQLSEKTVAGMAEGLEQIAALPDPVGEIDGLKFRPSGIQVGKMRVPLGVIGIIYEARPNVTADAAALCLKSGNAAILRGGSEALRCNQAVAACVREGLEAAGLPAAVVQVVETTDRAAVGELITMKDYVDVIVPRGGKGLIERITGEARVPVIKHLHGNCHVYVDDRADLAKAVKIVENAKTQRYGTCNTTESLLVARAVAAAALPQIGAMLAGKGVEMRGCPESLAILQAAGVPADKLRPAVESDWYEEYLGPIIAVKVVDDLDAAMIHINTHGSQHTDAIVTEDYGRARRFLREVDSASVVVNASTRFADGFEYGLGAEIGISTDKIHARGPVGLEGLTSQKWVVLGDGHVRA

SEQ ID NO: 51508 - protein, 354 aa, Guillardia theta
MSLVGNQRYSVIGRVVGSGSFGVVFQAKCRSNEETVAIKKVFQDDRYENREVEIMSMLVHSNILDLKHCFNFSEGNDLYYNLELEFFAENIHRVCQHYSNHKQTLPTIYVKLYMYQVLRALGYLHSMGICHRDIKPQNLLIDPATQHLKLGDFGSAKLLTLNEPSISYICSRYYRAPELLLGAIDYTNSIDMWSVGCVMGELVIGFPFFRGESGTDQLVEIIKVLGTPTKAQVRAMNNDYLEFQFPRLSSHPWENVFHGKHLEPEAIDLIHKMLDYLPSRRITAIKAISHPFFKQLKIKGAKLPNSKNLPLLFDFSKKEFEYSSRFTTEISTQKYLLFYCKSFLCKWYFGISIC

SEQ ID NO: 51509 - protein, 582 aa, Candida glabrata CBS138
MQGEGYYLGLDLSTQQLKCLAIDGDMQIKHTEVVDFDRDLPHYNTHKGVYSHGDVVECPVGMWLEAIDLVFEKYKGAGFDLSQVKAISGSCQQHGSVYWKTGAGDLLKHLNDANGNLVDQLYPDGFSRKTAPNWQDHSTGKQCTQIEKKAGGPEKLAEITGSRAHFRFTGPQIMKIAENEEDNYKNTETISLVSSFLTSILCAKLVPIEEADACGMNIYDIKAKRYDDSLLDVISGKFGKEDLLKKLSGSVTKCNSPQLMGNIANYFVSKYGFDSECAIYPFTGDNLATICSLPLEKNDILVSLGTSTTILMVTDQYHPSPNYHLFTHPAIANCYMAMICYCNGSLAREKVRDSLNENQSTSWTNFDEAVLDESLDTSGELAVYFPLGEIVPSVDAITKRVLYDPKNCEIVKYVDKFDNNRHDAKIIVESQALSARVRVAPLLSGTVDESNDEKSETMVHFDYDSMKFSEYSSKRPNRVYFVGGASKNDAIVKKFSEVLGAKNGNFRLETPNSCALGGCFKALWSDLWKKKKIDEKVTFDSFLNRYFPTDELEEIKVDDITKKWEAYKDKIIPLSKLEEELK

SEQ ID NO: 51510 - protein, 1021 aa, Oryza sativa (japonica cultivar-group)
MEKDSGGGGGGLARRLMLDASGREMDSPRFRAILRATSGRRKRAPDVKSFSHELNIRGPLLHPLQQRKPRGCVNSPEEFIGAIRTKFIRLKEEVDAELGVFAGDLVGALDKADGDEERVALEDLLVVAQRCAEMSPEELWVKCECIVQGLDDRRQELTAGVLKQAHTRVLFILTRCTRLLQFRKEGGGYVAADDKQHVLSLHQLSDLGLYPFKVAGGSSELGRKSTSSLTELKERLIRRRMLEHKQLTLDFSAGRVISSDTGGDSPGSGGKISSWKKLPSPAEKTLHKVTEPTTEEKTTPTKKKAITRNKVAVDEIVERIDAASIHPDGLSYLGDSAVKLEVPSGFPEAQQIIVDGKPRMICRICDFEIPMVCAEGHFIVCTLADRCDSKGLNTDQRLQRVAEVLGRVLGCFESKSPQTAECNHNETARGSTSSLTESDGSMDHDILSHLLTVPSTELFSEGALTPASGSMPQSPLLTPRTSHAESQLTKHKAFVELENFQQVESLMTIARGIERIKNSEYNSLEDLSSYLEDLNAVIDTRKVDALVVETFGRRIAKLLQEKFIQLCGQIEDSNTDSLGSIDEDGPMESSVSSRTSQMNGKFKDRTSIEDFEIIKPISRGAFGRVFLAKKRVTGDLFAIKVLKKADMIRKNAVESILAERDILISARNPFVVRFFYSFTCRENLYLVMEYLNGGDLYSLLRNLGCLDEDMARTYMAELVLALEYLHSMNVIHRDLKPDNLLISRDGHIKLTDFGLSKVGLINSTDDLSGPDVSNVLVGDHQPADAEQRAQKREQRQKQAAVGTPDYLAPEILLGMTHGPTADWWSVGVILFELLVGIPPFNAEHPQIIFDNIMNREIPWPQVPEELSFEAYDLIDKLLIENPVQRLGATGAGEVKAHPFFKDINWDMIARQQAAFIPSTDDEYDTSYFACRHTWDDQVNVASNDYDDRSETSSMSCGSSPHSCDYEEDADEFGSMEEFGAPSLSVKYSFSNFSFKNISQLASMNYDLITKHNEDPLQSSKS

SEQ ID NO: 51511 - protein, 133 aa, Oryza sativa
  misc_feature (41)..(41): Xaa can be any naturally occurring amino acid
  misc_feature (93)..(93): Xaa can be any naturally occurring amino acid
  misc_feature (121)..(121): Xaa can be any naturally occurring amino acid
  unsure (1)..(133): unsure at all Xaa locations
MRRRCLLRGRGFRVVDDDRPEKPRRHGVTEMRSPFYAFRPXRHHALQEILNSLGPFGDGWKFTGGSEGLMGKELRREITDLPHELDIYVSTGXDWAECLLRQGPSFFNQYVEESMGLRFDXIELNAGSIKLPE

SEQ ID NO: 51512 - protein, 582 aa, Glycine max
MLEKVEEFNTERMMEEFERVTKDAERIQRETLKRILEDNASAEYLLNLGLNGRTDPESFKAFVPLVTHKDLEPYINRIIDGDFSSVLTGKPITTMSLSSGTTQGKPKYVPWNDELFDTTLQIYHTSFAFRNREFPINNGKALGFIYSSKQFKTKGGVLAGTATTNVFRNPGFQHAMKAIQSPLCSPDEVIFGPDFHQSSYGHLLCGLIFREEVQLVSSIFAHSIVYAFRTFEQVWEELCVDIKEGVLNSKVTVPSIREAMSKLLKPDPELANLIHNKCMGLSNWYGLIPELFPNVKYVHGIMTGSMEPYLRKLRHYAGELPLLTSDYGSSEGWIGTNVKPTVPPELATYTVLPQIGYFEFIPLRELEEIKGDASFLCMEAKPVGLTEVKIGEEYEIVITNPAGLYRYRLGDVVKVMGFHNSAPEIKFVRRSNLLLSINIDKNTEKDLQLAVESASQLLAEEKLEVVDYTSHIDLSKEPGHYVIFWEISGEASEEVLGGCCNCLDKSFVDAGYTSSRKVNCIGALELRVVRRGTFQKILEHSLALGAAVSQFKTSRCVGPTNTKVLQILNENVVKNYLSTAFN

SEQ ID NO: 51513 - protein, 216 aa, Triticum aestivum
  misc_feature (91)..(91): Xaa can be any naturally occurring amino acid
  misc_feature (123)..(123): Xaa can be any naturally occurring amino acid
  misc_feature (154)..(154): Xaa can be any naturally occurring amino acid
  misc_feature (170)..(170): Xaa can be any naturally occurring amino acid
  misc_feature (204)..(205): Xaa can be any naturally occurring amino acid
  unsure (1)..(216): unsure at all Xaa locations
HSITSLYKKAGWYRSGIPGDIVDPRVRFSRSSLPSTPQAVGDCRSTASSPSSFPWPIPPTPPPPPGTPSSRKPDLKKSTKLTICEGEDGTXSSLGYVLIFPDMIRYRGLTHFDVNNFFEKVLXKNTEWVPGSPEAIKSSLCFVCCHGTRDKRCXVCGPALITRFKVNIEXKSLDRHVPFSACSPVGGNKYSGNVIIFRPKSQGXXDSLIWNGYGCP

SEQ ID NO: 51514 - protein, 426 aa, Lactobacillus plantarum WCFS1
MTKKAAFHNDEVVLDIHDRPKLGSWLGLSVQHLFSMFGSTVLVPILVGLNPGIALFSSGVGTLMYILITRGKIPAYMGSSFSFIVVMQSLMKTAGYPAIAQGTVAVGCVYLLVSLLVTLIGSDWIDKALPPIVVGPIVMVIGLSLAGTAAKDATMNGSSYDIKYFGVAMATMLLTVIFNMYLRGFMSLVPILLGIVCGYIIAVLVGIVDFSGVEKAQWFAMPAFQLPFISYHPGIYWGAILSMAPIAFVTMSEHMGHIMVLNKLTKRNFFKDPGLNHTLAGDGTASIIAGFVGGPPVTSYGENIGVLAITRVHSIYVLGGAAFFAIVFSFVGKLSALIESIPSPVIGGVSFLLFGVIASSGMRILIDNKVDFNQKRNLMIASAILVIGIGNAYLQLGSFQFSGLAVATVLGIVMNLVLPKTAVNEK

SEQ ID NO: 51515 - protein, 171 aa, Zea mays
  misc_feature (150)..(150): Xaa can be any naturally occurring amino acid
  unsure (1)..(171): unsure at all Xaa locations
RGRGRGTRGQLMRSKSLLPFFDSAYQGFASGSLDKDAQSVRMFVADGGELLMAQSYAKNMGLYGERVGALSIVCKSADVAVRVESQLKLVIRPMYSNPPLHGASIVATILRDSEMFNEWTLELKAMADRIINMRQQLFNALKSRGTPGDXEQVAFMRQEYHIYMTSDGRIS

SEQ ID NO: 51516 - protein, 405 aa, Escherichia coli O157:H7 EDL933
MSPIEKSSKLENVCYDIRGPVLKEAKRLEEEGNKVLKLNIGNPAPFGFDAPDEILVDVIRNLPTAQGYCDSKGLYSARKAIMQHYQARGMRDVTVEDIYIGNGVSELIVQAMQALLNSGDEMLVPAPDYPLWTAAVSLSSGKAVHYLCDESSDWFPDLDDIRAKITPRTRGIVIINPNNPTGAVYSKELLMEIVEIARQHNLIIFADEIYDKILYDDAEHHSIAPLAPDLLTITFNGLSKTYRVAGFRQGWMVLNGPKKHAKGYIEGLEMLASMRLCANVPAQHAIQTALGGYQSISEFITPGGRLYEQRNRAWELINDIPGVSCVKPCGALYMFPKIDAKRFNIHDDQKMVLDFLLQEKVLLVQGTAFNWPWPDHFRIVTLPRVDDIELSLSKFARFLSGYHQL

SEQ ID NO: 51517 - protein, 288 aa, Magnetospirillum magnetotacticum MS-1
MKFSSMLVFMSLWLLVVYAPICHWVWMLDEKGGAVGFLAKLGVLDFAGGTVVHINAGIAGLVACLILGPRKGYGTDNMAPHNLSLSIIGASLLWVGWFGFNAGSAVAADGRAGMAMAVTQVGAAAAAVSWMLAEWVLRKKPSALGIISGAVAGLVAITPASGFVDVKGALVIGLVAGVLCYWGATGLKHALKYDDSLDAFGVHGIGGIIGAILTGVFAVEKIGGTAGLLEGNGAQVMTQVYGVLTTLVYTAVVSFILLKAIDMVMGLRVTAEEEREGLDIALHGETVH

SEQ ID NO: 51518 - protein, 493 aa, Photorhabdus luminescens subsp. laumondii TTO1
MSQQQKSVSRKPATQHLRRELKARHLAMIAIGGSIGTGLFVASGATVSQAGPGGALLSYALIGLMVYFLMTSLGELAAYMPVSGSFSTYGSKYVEEGFGFALGWNYWYNWAVTIAVDLVAAQLVMGYWLPDMPGWIWSALFLALIFLLNFISVKGFGEAEYWFSLIKVSTVIVFIVVGLLMIAGIMKGAEGAGWHNWTVGDAPFAGGFSAMIGVAMIVGFSFQGTELIGIAAGESKDPAKNVPSAVRKVFWRILLFYIFAILIISLIIPYTDPSLLRNEVGDISVSPFTLVFENAGLLSAAAMMNAVILTAVLSAGNSGMYASTRMLFTLAKEGKAPRIFGKLSKGGVPRNALYATTVVAALCFLSSMYGNQTVYLWLLNTSGMTGFIAWLGIAISHYRFRRGYVAQGLDLSKLPYRSGFFPVGPIFAFVLCLTITLGQNYQAFLQDKIDWYGVTATYVGIPLFLLIWFGYKLARKTHFIKYSEMKFPDIENQ

SEQ ID NO: 51519 - protein, 391 aa, Alkalilimnicola ehrlichei MLHE-1
MNAGALSRMLSEGLAARRAEGLYRSPRVLKSVDGACGLTADGRTVVVFCANDYLGLASDPRPGRVMARVAEEQGAGSGAAHLVSGHRPEHEALERALADWTGREAALLFSTGYMANLGVIDALVGRGDTVFEDRLNHASLLDGARLSGARLRRYRHGDVDHLARRLAEDGGRHRLIVTDGVFSMDGDRAPVAELARLARDHGAWLMVDDAHGLGVLGEKGGGLLEQSGLDQDDVPVLVGTLGKAVGSFGAFVAGRRLLIDHLVQSARTWIYTTAPSPAQTAATVEAVRLARHETWRREHLRALVRRFRAGIADLGLDLMPSETPIQPIVVGEADQALQASRALEERGYLVTAIRPPTVPKGTARLRVTLSAAHTPQQVDGLVAALGQVLGQ

SEQ ID NO: 51520 - protein, 800 aa, Ralstonia eutropha JMP134
MRQTRPFWSIFVARTHILGFPRIGARRELKFAQESFWRGESTEADLRAVAATLRSRHWQLQADSGLDTVATGDFAYYDQVLSLTALLGALPRRFGFEPAALTLAQYFELARGNREQPAMEMTKWFDTNYHYLVPELDSATRFDGGPDWFFDELEEALALGLKARPVLIGPVTYLWLSKTHEAGFDKLSLLPQLAQAYQRILTRLKARGIDWVQIDEPALSLDLDAAWLDAYDRAYATLAQSGVKLLLATYFDSAADHAERAAALPVHGFHIDVVRAPAQLVAWRQALPPEAVLSVGVIDGRNIWRTDLRRALDTLKPLHAELGDRLWLAPSCSLLHVPVSLEHEVRLDAELKSWLAFATEKLGELCVLATVLNQGETAVAAQLVASDAVQASRRQSRRVVNPRVQQRLAAVTPDMADRDSAFDVRIERQREALQLPLLPTTTIGSFPQTAAIRQTRAAYKRGDLGALDYLHRIRGEIELAVRKQEALGLDVLVHGEAERNDMVEYFGEQLCGYAFTENGWVQSYGSRCVKPPVIYGDVYRPEPMTVDTARYAQSLTERPMKGMLTGPVTMLQWSFVRDDQPRADTARQLALAIRDEVCDLEQAGIRVIQIDEPALREGLPLRRADWDAYLAWAVNAFRLSAAGVADQTQIHTHMCYAEFNDILPSIAAMDADVITIETSRSAMELLEGFGDFDYPNEIGPGVYDIHSPRVPSVEAMEKLLDRACEVVPPQRLWVNPDCGLKTRGWDETEAALANMVSAARKLRGRLAGQDTLTWKRVARPQASQAAHRHGAECACSTRAA

SEQ ID NO: 51521 - protein, 426 aa, Bacillus subtilis subsp. subtilis str. 168
MAADRNTGHTEEDKLDVLKSTQTVIHKALEKLGYPEEVYELLKEPMRLLTVKIPVRMDDGSVKIFTGYRAHNDSVGPTKGGIRFHPNVTEKEVKAVKALSIWMSLKCGIIDLPYGGGKGGIVCDPRDMSFRELERLSRGYVRAISQIVGPTKDVPAPDVFTNSQIMAWMMDEYSRIDEFNSPGFITGKPLVLGGSHGRESATAKGVTICIKEAAKKRGIDIKGARVVVQGFGNAGSYLAKFMHDAGAKVVGISDAYGGLYDPEGLDIDYLLDRRDSFGTVTKLFNDTITNQELLELDCDILVPAAIENQITEENAHNIRAKIVVEAANGPTTLEGTKILSDRDILLVPDVLASAGGVTVSYFEWVQNNQGFYWSEEEVEEKLEKMMVKSFNNIYEMANNRRIDMRLAAYMVGVRKMAEASRFRGWI

SEQ ID NO: 51522 - protein, 278 aa, Staphylococcus epidermidis ATCC 12228
METVQFYNGRTMPKIGLGTYRVKDGDECRESVKYAIERGYRSIDTAMIYGNEETVGQGIKEGLESTGLSREDLFITSKLWLTDFGRQNVEDAYRQSVAKLGLDYLDLYLMHWPGTNEAVMIDTWRGMEDLYKQNQVKNIGVSNFTPEHFEALLAQVSIKPVINQVEFHPYLTQNKLRKYLEAQNIIMESWSPLMNSQILHDEVINEVANEVGKTPAQVVIRWNIQHDVVVIPKSVTPHRIEENLDVWNFELSDNQMERIDQLNQDKRIGPNPLEFDGK

SEQ ID NO: 51523 - protein, 250 aa, Crocosphaera watsonii WH 8501
MLATSSYNNIDKLDSPEIRPITESDQEVNEIASELGDSLIELELQNINFTETDPSTNRVTTDLVRLYLQDIGRVPLLTKEEEVSKSRQVQRYVELLEIRNQAAENDDEIMKQFVQVHGIHDQLMAYLGHRPSWEKWAKASEVSVFELKEILVQGKSQWAVLANMDVAELEEIQKSGIKAKDEIIKANLRLVVSVAKKYQHRGLELLDLIQEGTLGLEKAVEKFDPVKGYRFSTYAYWWIRQGITSAAWRK

SEQ ID NO: 51524 - protein, 480 aa, Glycine max
MAAASRRLRDLQSSAGNKICVDCSQKNPQWASVSYGVFMCLECSGKHRGLGVHISFVRSVTMDSWSDIQIKKMEAGGNDKLNAFLAQYSIPKETDIVTKYNTNAASVYRNRIQAIAEGRPWRDPPVVKENLSAGKGKPPLTQTRRNNDSGWDDWGNEGSPRSKSMSTGDFRTLNGAGGAPARSRSTEDIYTRSQLEASAANKEGFFARKMAENESRPEGLPPSQGGKYVGFGSSPTPPPQRRNDAQNDYFSVVSQGIGKLSFVAASAANVVQVGTKEFTSKVKEGGYDHKVNETVNVVTQKTSEIGQRTWGIMKGVMAMASQKIEEYTKDDPNWKNDNWQRNENDTNGYYQDFNREKKGWNSSTGREQSSSGEYKTESSSSWDDWDHKDSRKEEPAKGSTHSSGGQFSTYNSSSWDDWEHKDSRKEEPAKGSAPHNNDDWAGWDNAKDDGFDNIYEGASNKKGVGHKGKSDGTWTEEGFL

SEQ ID NO: 51525 - protein, 619 aa, Oenococcus oeni PSU-1
MHFKIALIFTVITLITLGLVGAFFVNQYSSQLIQSFDDRVTVPSTIKSQLISDLQNSNKKAANQDINQALSTLGGSTDQDYVYVVDKSGVIRGSLTVEMKQLVGQQIDSSISGKKVQSNIYHALSSSKDYVRRFRSESLGRRYETLTIPLESKPGDRSSTVGVFVYTASMESIYESIANITNMFVGALFIPLLMAIMIGFLMVHLLTRPITELAEQTEQITKGNYSIKNSIKSKDEIGILATQINDLSDTIASETATSNMESDRLNSLLSNMTDGVLAITRDGTITVINQAALDLLHIPRTYKAVGKNISDLLKLVDKKITLRKLFQSIRGFVVEPDGPDGVTLNAVASLVRRQSGFISGAVVVLRDVTRQLKLENDQKNFVSNVSHELRTPLTSVNSYIETLQEGALTQKKIAREFLGVAHDETQRMIHMINDLLELSRMDQGRTKMDTEAVNFTKFINYVLDRFDVMFKQGHSMHSDNHYKIIRNYDQKKSCYVEIDSDKFMQVVDNVINNAINYSPDGGNIEIGINETDDSIILSIKDHGLGIPKKDLENVFTRFYRVDKSRARKQGGTGLGLAISKEVVEALHGKIRVESTVNVGTTFFISLPKVDTSSSRFDFS

SEQ ID NO: 51526 - protein, 425 aa, Oenococcus oeni PSU-1
MTEEQDQGKTQKDIQGKKPKKNRPIGRIIATALLAGLLGGGVAVGAGYIYTQTTDFIGKSTGALSDGKTTIKAPTISGKSNATKVYNNLKGAVVSVINQQATSSSSTIYGDSSKKSSSSTSSFSTLQTASEGSGVIYKDADGYAYIVTNYHVISGAKRIQVVLYGGTKVVAKKVGSDAMTDLAVLRISGSDVKTVAQFGNSNQIKTGQTVLAIGSPLGTDYASSVTEGIISASKRLVSNTSESGKTNYGDSIAIQTDAAINPGNSGGPLVNTSGQVIGINSQKLTETDEGESVEGMGFAIPSNTVVSIINKLIKYGKVVRPALGVEVVDLSEVSSDVVKKTLKLPSKVKTGIVIAGFSSDKSPAKKAGIKKYDVIVAVNGEKVSNLADMRDIIYKLKVGDTVKITYYRASTEKTVKVKMTETLKQ

SEQ ID NO: 51527 - protein, 349 aa, Prochlorococcus marinus str. MIT 9313
MTATTATAPTMRGGGRNELPPHLDDNLLTPRFYTTEFDKAAKTDLDIARKDFEAMFKEMEADYNLKHFDRKASLERLSELSPEDKAIYESYLVRSVVSEFSGFLLFKEISNRFKKAGRQELGQFFTFLARDEARHAGFLGRALKAEGINVDLPNLGNKRAATFFPLSWVLYSLYLSEKIGYWRYILINRHLNDNPEKVCAPLFDFFEPWCQDENRHGDCINLMMRCWPGMTKGFRGKLLSRFFLWSVFLTHTLTVCERGDFYGLLGIDPVLFDEEVIIQTNNTSRNAFPWVYNFDDGKFLEMRVQILKAFRNWRESSGLAKPVALSKFVSLILRQFALPMQKTNAVRYG

SEQ ID NO: 51528 - protein, 396 aa, Burkholderia fungorum LB400
MSEAARFTEVSDLAPAAESLREIRHHIHHHPELAYEEHQTGELVAAKLEQWGWQVTRGVGRTGVVGTLKVGDGTRSIGIRADMDALPIIEQTGLPYASGTHGKMHACGHDGHTTMLLGAAQRLAATRNFSGTVHLYFQPAEESGIDSGALKMIDDGLFERFPCDAVFGMHNHPGEQPGVLLFRKGPFMSAGDKAIITIEGVGGHAARPHLTVDPVVVAASIVMALQTIVARNVDPSQPAVVTVGAMHAGTANNVISSSAKLELSVRSFSPEVRALLKKRITELAESQAASYGGKAVVEYIEGYPVVVNSDAETDFAVEVARELVGEDKVVAQTDILMGSEDFAFMLQKRPGTFLRIGNGAGEDGCMVHNPHYDFNDRNLPVGAAFWTRLVERYLGR

SEQ ID NO: 51529 - protein, 508 aa, Rickettsia rickettsii
MVNLKIVIVIIFLISSNVVLAKENSKSLKVAAQEENEFTEINSAPLKVSEAARYSFADIVEPLIPAVVNISTIEYVNSKSENAEKDPLQEKVNDFLEKLNIPLNLEEVDQTPKSVPLGSGFIIEPNGLIVTNYHVIANVDKINIKLADNTELSAKLIGNDTKTDLALLKIDSEEPLPFVEFGDSNDARVGDWVIAIGNPFGNLGGTVTSGIISSKGRDIDIDTDNIVDNFIQTDAAINNGNSGGPMFNLDQKVIGVNTAIFSPLGTNIGIGFAIPSNTAKPIIERLKKDGKVSRGRLGVTIQDLTEEISEGLGLKNTRGVLVAKVQEDGPGDKAGIKTGDIIIEFADIPVKNTKKLRVIIADAPIDQEVKVKILRDKKELELPIKVTSDNEEVTKDSTEETNKKEITNKEENNLSITKNNITFGNLTEELRQKYTIPQDKMGIVITNIDEEESSFKIGDLITNINQESIDDISKLEELYDNAKKSDKQNILLLIERGSSNMFVPLQVM

SEQ ID NO: 51530 - protein, 382 aa, Desmodium uncinatum
MTVSGAIPSMTKNRTLVVGGTGFIGQFITKASLGFGYPTFLLVRPGPVSPSKAVIIKTFQDKGAKVIYGVINDKECMEKILKEYEIDVVISLVGGARLLDQLTLLEAIKSVKTIKRFLPSEFGHDVDRTDPVEPGLTMYKEKRLVRRAVEEYGIPFTNICCNSIASWPYYDNCHPSQVPPPMDQFQIYGDGNTKAYFIDGNDIGKFTMKTIDDIRTLNKNVHFRPSSNCYSINELASLWEKKIGRTLPRFTVTADKLLAHAAENIIPESIVSSFTHDIFINGCQVNFSIDEHSDVEIDTLYPDEKFRSLDDCYEDFVPMVHDKIHAGKSGEIKIKDGKPLVQTGTIEEINKDIKTLVETQPNEEIKKDMKALVEAVPISAMG

SEQ ID NO: 51531 - protein, 596 aa, Rickettsia rickettsii
MTKAYNIVHHKFDVVVVGAGGAGLRSAFGMAKAGLNTACITKLFPTRSHTVAAQGGISAALGNMGEDDWRWHMYDTVKGSDWLGDQDAIEYMCKNAPDAILELEHYGVPFSRTEEGKIYQRPFGGMTTEYGKGKAAQRTCAAADRTGHAILHTLYQQSLKHKVQFFVEYFAIDLLMEDGECRGVVAWNLDDGSLHCFRAHNVVLATGGYGRAYFSATSAHTCTGDGGGMAIRAALPLQDMEFVQFHPTGIYSAGCLITEGARGEGGYLVNANGERFMERYAPAAKDLASRDVVSRAMTIEIREGRGVGEHKDHVFLHLNHLSSEILHSRLPGISETAKIFAGVDVTKEPIPVLPTVHYNMGGIPTNYHGQVIIKDGKNHNSVVKGLMAIGEAACVSVHGANRLGSNSLLDLVVFGRSSALKAAELIKPASPHKSIKEESLEKIINRFDKVRHANGNILVAELRLKMQRTMQSHASVFRTQELLDEGAGMISEIRSGYKDIKINDKSLIWNSDLVEALELDNLLDQALVTVYSAAARKESRGAHAREDYPDRNDEDWMKHTLSSIDEAGKVVLDYKPVTLTTLTDEVTAVPPVKRVY

SEQ ID NO: 51532 - protein, 80 aa, Glycine max
MSRSVPLVSTIFVLLLLLVATAEMMGPTMVAEARTCESQSHRFKGPCLSDTNCGSVCRTERFTGGHCRGFRRRCFCTKHC

SEQ ID NO: 51533 - protein, 332 aa, Candida glabrata CBS138
MVRIAINGFGRIGRLVLRVALSRSNIEVVAVNDPFITTDYAAYMFKYDSTHGRYAGEVTHDDKHIIIDGKKIAVHQERDPANLPWGSENIDIAIDSTGVFKELDTAQKHIDAGAKKVVITAPSSTAPMFVVGVNEDKYTSDLKIVSNASCTTNCLAPLAKVIDEAFGIEEGLMTTVHSLTATQKTVDGPSHKDWRGGRTASGNIIPSSTGAAKAVGKVLPQLQGKLTGMAFRVPTVDVSVVDLTVKLQKETTYDEIKKVIKQASEGKLKGVLGYTEDAVVSSDFLGDSRSSIFDASAGIQLSPKFVKLVSWYDNEYGYSTRVVDLVEHVAKN

SEQ ID NO: 51534 - protein, 452 aa, Candida glabrata CBS138
MLYNYKRSLAVGILASVVAADSCDPLKQTNCPADKALATSFSENFTSESKWFTAEDNPGKIEYTSDGLAMSLTKRFDNPSLKSNFYIMYGKTEVIFKAGDGRGIVSSFFLQSDDLDEIDLEWIGSDDTQFQSNYFSKGNTATYDRGEFHGVNQPQKEFHNYTIDWTMEQLTWYLDGQVVRVLPNTTSQGYPQTPMYIKMGIWAGGDPSNAPGTIEWAGGETDYSLAPFTMYIKSLVVTDYSTGKEYTYGDQSGSWQSIKAVDGEINGRYQQAQEDFAKLVAGQAIESSQSSSVSPTSSSSSSASSSTSSSTSSSTSSSASSSASSSSSSSISSSSSASSSAQSSSSPIASSVSSIKSVSSSAISSSKSSQTAESKSSTSSSVKPTTQSSKTDTIMDNVTHSASTSNVAKSTVSTVAKSTESSTHSVQQSNFGVNTQVSVVSVILGFIFSIVI

SEQ ID NO: 51535 - protein, 328 aa, Burkholderia vietnamiensis G4
MSKPARRVAVTGAAGQIAYSLLFRIARGDLLGDDQPVILQLLELPHALDALRGVVMELEDCAFPLLQSVEISDDPRVAFRDADYAMLVGSRPRGKGMERRDLLAANAAIFRSQGEALNEVANRQVKVLVVGNPANTNAWVARHYAPDLPADAITAMIRLDHNRAVSKLAARCGVTVDAVSRMAVWGNHSPTMFPDYRHALIDQQPAPMRVGDERWYLDTFIPEVARRGTAIIEARGASSAASAANAAIDQMRDWIRGSGGRWVSMSIVSGGEYGIPRGLMFGMPTICSEGRYRVVPDLEIDALARARIDASVAELVDEMQAVRAILAL

SEQ ID NO: 51536 - protein, 389 aa, Digitalis nervosa
MSWWWAGAIGAAKKKSEEDDAPPKHSSVALIVGVTGIIGNSLAEILPLADTPGGPWKVYGVARRTRPAWHEDNPINYVQCDISDPDDSQAKLSPLTDVTHVFYVTWANRSTEQENCEANSKMFRNVLDAVIPNCPNLKHISLQTGRKHYMGPFESYGKIESHDPPYTEDLPRLKYMNFYYDLEDIMLEEVEKKEGLTWSVRRPGNIFGFSPYSMMNLVGTLCVYAAICKHEGKVLRFTGCKAAWDGYSDCSDADLIAEHHIWAAVDPYAKNEAFNVSNGDVFKWKHFWKVLAEQFGVECGEYEEGVDLKLQDLMKGKEPVWEEIVRENGLTPTKLKDIGIWWFGDVILGNECFLDSMNKSKEHGFLGFRNSKNAFISWIDKAKAYKIVP

SEQ ID NO: 51537 - protein, 422 aa, Desulfovibrio desulfuricans G20
MERSRNLFERAQKLIPGGVNSPVRACLSVDSAPVFVERGQGSKLYSVDGREYIDFVESWGPLLLGHAHPAVNKAIHEAVDKGSSFGAPCEDEIRLAEAVVDAVPSIEMVRMVSSGTEATMSALRLARGYTGRNKLIKFEGCYHGHGDAFLASAGSGVATLSIPGTPGVPDTVVADTLLAPYNNLERVKALFENHGADIAAVIVEPTAGNMGLVRPAAGFLQGLRELCDRYGALLIFDEVITGFRLSYGGAQQYFGITPDLTTLGKIIGGGMPVGAYGGRREIMERIAPCGDVYQAGTLAGNPVAMAAGIATLAELKKADYPALEKRVDALASEIEAILKAKGVPVTVNRLASMFTIFFTEEPVTDYDSAKKADGTLYTRFYQQMRDQGIYLAPSGFECAMVSLAHTEDDFAAMLAAVRNVTF

SEQ ID NO: 51538 - protein, 503 aa, Triticum aestivum
  misc_feature (74)..(74): Xaa can be any naturally occurring amino acid
  misc_feature (263)..(263): Xaa can be any naturally occurring amino acid
  misc_feature (278)..(278): Xaa can be any naturally occurring amino acid
  misc_feature (285)..(285): Xaa can be any naturally occurring amino acid
  unsure (1)..(503): unsure at all Xaa locations
TIEQFLQKSRLVPVRSWRDIVDADLLPTEESRTDRSQGSLVLLPKIFVKTLTGKTITLEVESSDTIDNVKAKIXDKEDISLDQQRLIFAGKQLEDGCTFADYNIQKESTLHLVLRLRGGMQIFVKTLTGKTITLEVESSDTIDNVKAKIQDKEGIPPDQQRLIFAGKQLEDGRTLADYNIQKESTLHLVLRLRGGMQIFVKTLTGKTIMLEVESLDTIDNVKAKIQDKEGIPLDHQHLIFAGKQPEDGRTLADYNIQKESTLXHLVFRFRGGMQIFVXKTLTGKXHHVGEVKSWDTIDNVKAKIQDKEGIPRDQQRFIFAGKQLEDGRTLADYNIQKESTLHLVLRLRGGMQIFVKTLTGKTITLEVESSDTIDNVKAKIQDKEGIPPDQQRLIFAGKQLEDGRTLADYNIQKESTLHLVLRLRGGMQIFVKTLTGKTITLEVESSDTIDNVKAKIQDKEGIPPDQQRLIFAGKQLEDGRTLADYNIQKESTLHLVLRLRGGQ

SEQ ID NO: 51539 - protein, 688 aa, Neurospora crassa
MAPTWTAAARTPARQANTPPTPARHLGILSILPSSPQWHLAVRLPLCVEVPSLKETHLGPLSSPFSRSPSTSTITDKEDKSQAGSSGAATPSNENTIAASEALTQAPIVKPPKPGILVVTLHEGSGFSLPEQYRNVFSSNHGGNSMSTGSALNVAGSIRTNNSSRTANFLSGSSRPQSSGGFGAIPTNHGRISTKYMPYALIDFDKVQVFVNSVEGNPENPLWAGSNTQYKFDVSRVTELAVHLYIRNPNAAPGSGRSQDIFLGVVRINPRFEEKQQFVDDPKASKKDREKAAADFANKERALGHSGVEWVDVQYGTGKLKIGVEYVENRAGKLKIEDFELLKVVGKGSFGKVMQVRKKDTNRIYALKTIRKAHIISRSEVAHTLAERSVLAQINNPFIVPLKFTFQSPEKLYFVLAFVNGGELFHHLQKEQRFDVNRSRFYTAELLCALECLHGFNVIYRDLKPENILLDYQGHIALCDFGLCKLDMKDEDRTNTFCGTPEYLAPELLMGNGYNKTVDWWTLGVLLYEMLTGLPPFYDENTNEMYRKILSEPLHFPGPEVVPPAAKDLLTKLLNRDPQQRLGANGAAEIKAHPFFHAIDWRKLLQRKYEPAFKPNVVDALDTANFDPEFTSELPQDSYVEGPILSETMQNQFTGFSYNRPIAGLGDAGGSVKDPSFASSLQDNSSRR

SEQ ID NO: 51540 - protein, 241 aa, Glycine max
MGVPEKDPLSQLSLPPGFRFYPTDEELLVQYLCRKVAGHHFSLPIIAEIDLYKFDPWVLPSKAIFGEKEWYFFSPRDRKYPNGSRPNRVAGSGYWKATGTDKIITTEGRKVGIKKALVFYVGKAPKGTKTNWIMHEYRLLDSSRKNTGTKLDDWVLCRIYKKNSSAQKTAQNGVVPSNEHTQYSNGSSSSSSSQLDDVLESLPSIDERCFAMPRVNTLQQPQHHEEKVKPDARHGELQRVQ

SEQ ID NO: 51541 - protein, 432 aa, Cucumis melo
  misc_feature (205)..(205): Xaa can be any naturally occurring amino acid
  misc_feature (215)..(215): Xaa can be any naturally occurring amino acid
  unsure (1)..(432): unsure at all Xaa locations
MAQILAPSTQWQLRTKLTSMSSSPITPKMWSSILLKQNKKGAVKSSSKYRVLSVKSVGGTINRMEDLLNLDVTPYTDKIIAEYIWIGGSGIDLRSKSRTISKPVEHPSELPKWNYDGSSTGQAPGEDSEVILYPQAIFKDPFRGGNNILVICDAYTPAGVPIPTNKRHRAAEIFSNKKVVDEIPWYGIEQEYTLLQTNVKWPLGXPVGAYPGPQXPYYCGVGADKSFGRDISDAHYKACLYAGINISGTNGEVMPGQWEYQVGPSVGIEAGDHIWCSRYILERITEQAGVVLSLDPKPIEGDWNGAGCHTNYSTKSMREEGGFEVIKKAILNLSLRHKDHISAYGEGNERRLTGKHETASINTFSWGVANRGCSIRVGRDTEKQGKGYLEDRRPASNMDPYVVTSLLAETTILWEPTLEAEALAAQKLSLKV

SEQ ID NO: 51542 - protein, 492 aa, Vigna radiata var. radiata
MDPYKYRPSSAFNSPFWTTNSGAPVWNNNNSLTVGTRGPILLEDYHLVEKLANFDRERIPERVVHARGASAKGFFEVTHDVSHLTCADFLRAPGVQTPVIVRFSTVIHERGSPETLRDPRGFAVKFYTREGNFDLVGNNLPVFFVRDGMKFPDMVHALKPNPKNHIQENWRILDFFSHFPESLHMFSFLFDDLGVPQDYRHMDGFGVNTYTLINKAGKAVYVKFHWKTTSGVKCLLEEEAIKVGGANHSHATQDLHDSIAAGNYPEWKLFIQTIDPEHEDKFDFDPLDVTKTWPEDIIPLQPVGRLVLNKNIDNFFAENEQLAFCPAIIVPGVYYSDDKMLQTRIFSYADSQRHRLGPNYLLLPANAPKSAHHNNHHEGFMNFIHRDEEVNYFPSRYDPVRHAEKFPIPPAVFSGRREKIAIEKENNFKQAGERFRSWAPDRQDRFIRRWVDALSDPRVTHEIRSVWISYWSQADRSLGQKIASHLNMRPNI

SEQ ID NO: 51543 - protein, 544 aa, Agrobacterium tumefaciens str. C58
MAAKEVKFGRSAREKMLKGVDILADAVKVTLGPKGRNVVIDKSFGAPRITKDGVSVAKEIELEDKFENMGAQLVREVASKTNDIAGDGTTTATVLAQAIVREGAKAVAAGMNPMDLKRGIDLAVAEVVKDLQAKAKKINTSEEVAQVGTISANGERQIGLDIAEAMQRVGNEGVITVEEAKTAETELEVVEGMQFDRGYLSPYFVTNPEKMVADLEDAYILLHEKKLSNLQAMLPVLEAVVQTGKPLVIIAEDVEGEALATLVVNKLRGGLKIAAVKAPGFGDRRKAMLEDIAILTGGTVISEDLGIKLESVTLDMLGKSKKVSISKENTTIVDGAGQKSDIEGRVAQIKAQIEETTSDYDREKLQERLAKLAGGVAVIRVGGSTEVEVKEKKDRIDDALNATRAAVQEGIVPGGGVALLRSSTKITVKGVNDDQEAGINIVRKALQSLVRQIAENAGDEASIVVGKILDKNEDNYGYNAQTGEYGDLIALGIVDPVKVVRTALQNAASVASLLITTEAMIAELPKKESAMPQMPGGGMGGMDF

SEQ ID NO: 51544 - protein, 98 aa, Agrobacterium tumefaciens str. C58
MTSTNFRPLHDRVVVRRVESEAKTKGGIIIPDTAKEKPQEGEIVAVGSGARDEAGKVVALDVKVGDRVLFGKWSGTEVKLDGEDLLIMKEADIMGIIG

SEQ ID NO: 51545 - protein, 168 aa, Arabidopsis thaliana
MVARSEEIVIVEEDTTAKCLMLLSRVGECGGGCGGDERVFRCKTCLKEFSSFQALGGHRASHKKLINSDNPSLLGSLSNKKTKTSHPCPICGVKFPMGQALGGHMRRHRNEKASGTLVTRSFLPETTTVTALKKFSSGKRVACLDFDLDSMESLVNWKLELGRTISWC

SEQ ID NO: 51546 - protein, 589 aa, Bacillus subtilis subsp. subtilis str. 168
MKFWKSVVGKLWFTILSLVLIVLFILTVLLLEFIENYHVEEAENDLTQLANKVAVILENHEDQALARSITWELADNLTSIAIIQDEKNHWYSPNDKNRLSSITVEQIQHDKDLNKALKDHKKVSKRTGLSDTDTDNERLIVGVPYEKDGKKGMVFLSQSLLAVKDTTKHTTRYIFLAAGIAIVLTTFFAFFLSSRVTYPLRKMREGAQDLAKGKFDTKIPILTQDEIGELATAFNQMGRQLNFHINALNQEKEQLSNILSSMADGVITINIDGTILVTNPPAERFLQAWYYEQNMNIKEGDNLPPEAKELFQNAVSTEKEQMIEMTLQGRSWVLLMSPLYAESHVRGAVAVLRDMTEERRLDKLREDFIANVSHELRTPISMLQGYSEAIVDDIASSEEDRKEIAQIIYDESLRMGRLVNDLLDLARMESGHTGLHYEKINVNEFLEKIIRKFSGVAKEKNIALDHDISLTEEEFMFDEDKMEQVFTNLIDNALRHTSAGGSVSISVHSVKDGLKIDIKDSGSGIPEEDLPFIFERFYKADKARTRGRAGTGLGLAIVKNIVEAHNGSITVHSRIDKGTTFSFYIPTKR

SEQ ID NO: 51547 - protein, 615 aa, Salmonella typhimurium
MEQNPQSQLKLLVTRGKEQGYLTYAEVNDHLPEDIVDSDQIEDIIQMINDMGIQVMEEAPDADDLLLAENTTSTDEDAEEAAAQVLSSVESEIGRTTDPVRMYMREMGTVELLTREGEIDIAKRIEDGINQVQCSVAEYPEAITYLLEQYDRVEAEEARLSDLITGFVDPNAEEEMAPTATHVGSELSQEDLDDDEDEDEEDGDDDAADDDNSIDPELAREKFAELRAQYVVTRDTIKAKGRSHAAAQEEILKLSEVFKQFRLVPKQFDYLVNSMRVMMDRVRTQERLIMKLCVEQCKMPKKNFITLFTGNETSETWFNAAIAMNKPWSEKLHDVAEEVQRCLQKLRQIEEETGLTIEQVKDINRRMSIGEAKARRAKKEMVEANLRLVISIAKKYTNRGLQFLDLIQEGNIGLMKAVDKFEYRRGYKFSTYATWWIRQAITRSIADQARTIRIPVHMIETINKLNRISRQMLQEMGREPTPEELAERMLMPEDKIRKVLKIAKEPISMETPIGDDEDSHLGDFIEDTTLELPLDSATTESLRAATHDVLAGLTAREAKVLRMRFGIDMNTDHTLEEVGKQFDVTRERIRQIEAKALRKLRHPSRSEVLRSFLDD

SEQ ID NO: 51548 - protein, 591 aa, Arabidopsis thaliana
MAAATSSIAPSLSCPSPSSSSKTLWSSKARTLALPNIGFLSSSSKSLRSLTATVAGNGATGSSLAARMVSSSAVKAPVSLDFETSVFKKEKVSLAGYEEYIVRGGRDLFKHLPDAFKGIKQIGVIGWGSQGPAQAQNLRDSLVEAKSDIVVKIGLRKGSRSFEEARAAGFTEESGTLGDIWETIAGSDLVLLLISDAAQADNYEKIFSHMKPNSILGLSHGFLLGHLQSSGLDFPKNISVVAVCPKGMGPSVRRLYVQGKEINGAGINASFAVHQDVDGRAADVRLGWSVALGSPFTFATTLEQEYRSDIFGERGILLGAVHGIVESLFRRYTENGMSEDLAYKNTVECITGTISRTISTQGMLAVYNSLSEEGKKDFETAYSASFYPCMEILYECYEDVQSGSEIRSVVLAGRRFYEKEGLPAFPMGNIDQTRMWKVGERVRKSRPAGDLGPLYPFTAGVYVALMMAQIEILRKKGHSYSEIINESVIESVDSLNPFMHARGVSFMVDNCSTTARLGSRKWAPRFDYILTQQALVAVDSGAAINRDLISNFFSDPVHGAIEVCAQLRPTVDISVPADVDFVRPELRQSSN

SEQ ID NO: 51549 - protein, 921 aa, Oryza sativa
MASKGTGGGHGGVERKEQQQQRGYQLPRDSRGSLEVFNPSSASSFRTAAAAAKSASPFLAIPDREEDNVVAQQRAAEWGLVLQTDYHTGLPQGVSTRPSSCSARTSSEDTPQQQQSAAAIPRVSEELRAALSAFQQTFVVSDATRPNHPIMYASAGFFNMTGYTSKEVVGRNCRFLQGSGTDPHEIDKIRQALANGSNYCGRILNYKKDGTPFWNLLTIAPIKDEDGRLLKFIGMQVEVSKYTEGKKETVVRPNGLSESLIKYDARQKDHARSSVSELLLALKNPRSLSESSNNTLKRKSQESLSMSMSEVPSKRSSESGSRRNSRSGTRSSLQKINEVPDQVNRTRKSGLRAFMGFLGMGHGSVEKNMLKPRDEDPLIDSDDERPESFEDEFRRKEMRRGIDLATTLERIEKNFVITDPRLPDNPIIFASDSFLQLTEYNREEILGRNCRFLQGPETDRAIVRKIRDAIDNQAEVTVQLINYTKSGKKFWNLFHLQPMRDQKGDVQYFIGVQLDGTEHVQDDAAEEGVVLVKKTADNIDEAAKELPDANLRPEDLWANHSKVVLPNPHMKDTASWRAIQKVLESGESIGLKHFRPIKPLGSGDTGSVHLVELLNTGEYFAMKAMDKSIMLNRNKVHRATAERQILDLLDHPFLPTLYASFQTKTHICLITDYCPGGELFVLLDNQPLKVLHEDAVRFYVAEVVIALEYLHCQGIIYRDLKPENILLHRDGHISLTDFDLSCLTSCRPQVFLPEDADEKKGRKNRSYPIFFAEPMRASNSFVGTEEYIAPEIITGAGHTSAVDWWALGILLYEMLYGYTPFRGKTRQRTFANILHKDIRFPASILVSLAARQLMYRLLHRDPANRLGSYEGANEIKGHPFFRGINWPLIRATAPPKLEIPLFSKDDMEKKGLVTDNRTDIF

SEQ ID NO: 51550 - protein, 373 aa, Vibrio vulnificus CMCP6
MSIQSFIPPRRILMGPGPSDISPQVLQALSRPTVGHLDPLFIQMMDELKQLLKYAFQTKNDFTIAVSAPGSAGMEACFVNLIEPGDKVIVCRNGVFGERMRENVIRAGGEAILVDDEWGTPVSIEKVEQALTQHPDTKILAFVHAETSTGARSDAETLGKLAKQYGVLTIVDTVTSLGGIPLKVDEWQLDAVYSGSQKCLSCVPGLAPVTFSSAAIEKIQSRKIPVQSWFLDQSLVLGYWSGEGKRSYHHTAPVNSLYSLHEALLMLKNEGLENAWARHEKMHNKLKVGLEKLGFQFVVDEAYRLPQLNAIYVPEGIDEAKVRSHLLETYNLEIGAGLGALAGKAWRIGLMGYGAREENVALCLRALEESLTQ

SEQ ID NO: 51551 - protein, 391 aa, Yarrowia lipolytica CLIB122
MILSNLLLASVVSAAVIGLPLQARDLKDASPAIKAHLEARQDKPLHGSMSLEGVYYQADLEIGTPPQKVSVTFDTGSPLLWVPGANSTSCEKNECISSFDNSKSSTWRYNKPGEDWGGSGNWGFDTVSYVGVSLEDFNVYVSSDNIAYKGHNLGIWGQSPNKDIKGSFVQGLAALGKISRPIYSLNSEYYVNYDTKETQGTVTNVYYGGFDKKKYQGPLTTINTSGYGAYGIPISGLLVNGEKIKGERNHAVVLDTGGVNFDITNNTLGAVARANGGGWGSKGWELKCGTKPTLTYEFGYTTIDLDLTVYVTKDSDGICRFHNLRVVSDNKGTLLTGPALISRALVIYDNDRSQITVGRARYTKESEVVEITGDIPGAVLYTDFLAGKPLN

SEQ ID NO: 51552 - protein, 1013 aa, Arabidopsis thaliana
MKFIYNPTLRHVTVCVIKSKAFLANNGRKTTRVGMDHPDPIRKRYRPSSAYNAPFYTTNGGAPVSNNISSLTIGERGPVLLEDYHLIEKVANFTRERIPERVVHARGISAKGFFEVTHDISNLTCADFLRAPGVQTPVIVRFSTVVHERASPETMRDIRGFAVKFYTREGNFDLVGNNTPVFFIRDGIQFPDVVHALKPNPKTNIQEYWRILDYMSHLPESLLTWCWMFDDVGIPQDYRHMEGFGVHTYTLIAKSGKVLFVKFHWKPTCGIKNLTDEEAKVVGGANHSHATKDLHDAIASGNYPEWKLFIQTMDPADEDKFDFDPLDVTKIWPEDILPLQPVGRLVLNRTIDNFFNETEQLAFNPGLVVPGIYYSDDKLLQCRIFAYGDTQRHRLGPNYLQLPVNAPKCAHHNNHHEGFMNFMHRDEEINYYPSKFDPVRCAEKVPTPTNSYTGIRTKCVIKKENNFKQAGDRYRSWAPDRQDRFVKRWVEILSEPRLTHEIRGIWISYWSQADRSLGQKLASRLNVRPSSAHDSPFFTTNSGAPVWNNNSSLTVGTRGPILLEDYHLLEKLANFDRERIPERVVHARGASAKGFFEVTHDITQLTSADFLRGPGVQTPVIVRFSTVIHERGSPETLRDPRGFAVKFYTREGNFDLVGNNFPVFFVRDGMKFPDMVHALKPNPKSHIQENWRILDFFSHHPESLHMFSFLFDDLGIPQDYRHMEGAGVNTYMLINKAGKAHYVKFHWKPTCGIKCLSDEEAIRVGGANHSHATKDLYDSIAAGNYPQWNLFVQVMDPAHEDKFDFDPLDVTKIWPEDILPLQPVGRLVLNKNIDNFFNENEQIAFCPALVVPGIHYSDDKLLQTRIFSYADSQRHRLGPNYLQLPVNAPKCAHHNNHHDGFMNFMHRDEEVNYFPSRLDPVRHAEKYPTTPIVCSGNREKCFIGKENNFKQPGERYRSWDSDRQERFVKRFVEALSEPRVTHEIRSIWISYWSQADKSLGQKLATRLNVRPNF

SEQ ID NO: 51553 - protein, 324 aa, Arabidopsis thaliana
MVSFERNIRVLLQSVAYESSETMVQPGTEIKASDLTLLVITIILFAIFIVGLASVCFRWTSRQFYSQESINPFTDSDVESRTSITAVRGLDEAIINSFPTFLYSEVKERRIGIGGVECAVCICEFEDHETLRLMPECCHVFHADCVSVWLSDHSTCPLCRVDLCLQPGERSYLNPEPDLVESTNSHLFDGVTWTNRNRPSRSWSTRLSQCRVSQILISRSHSTGHSVVQPLDNLDRFTLRLPEEVRRQLTKKTVDNVAFSQARSSRRGYRSRSAGSERSVFSYQRRMHSFSDCAWSTSCGGEAVAPSKDFRRISVEQSQLDDRV

SEQ ID NO: 51554 - protein, 1729 aa, Arabidopsis thaliana
MQSIMDSSAVNATEATEQNDGSRQDVLEFDLNKTPQQKPSKRKRKFMPKVVVEGKPKRKPRKPAELPKVVVEGKPKRKPRKAATQEKVKSKETGSAKKKNLKESATKKPANVGDMSNKSPEVTLKSCRKALNFDLENPGDARQGDSESEIVQNSSGANSFSEIRDAIGGTNGSFLDSVSQIDKTNGLGAMNQPLEVSMGNQPDKLSTGAKLARDQQPDLLTRNQQCQFPVATQNTQFPMENQQAWLQMKNQLIGFPFGNQQPRMTIRNQQPCLAMGNQQPMYLIGTPRPALVSGNQQLGGPQGNKRPIFLNHQTCLPAGNQLYGSPTDMHQLVMSTGGQQHGLLIKNQQPGSLIRGQQPCVPLIDQQPATPKGFTHLNQMVATSMSSPGLRPHSQSQVPTTYLHVESVSRILNGTTGTCQRSRAPAYDSLQQDIHQGNKYILSHEISNGNGCKKALPQNSSLPTPIMAKLEEARGSKRQYHRAMGQTEKHDLNLAQQIAQSQDVERHNSSTCVEYLDAAKKTKIQKVVQENLHGMPPEVIEIEDDPTDGARKGKNTASISKGASKGNSSPVKKTAEKEKCIVPKTPAKKGRAGRKKSVPPPAHASEIQLWQPTPPKTPLSRSKPKGKGRKSIQDSGKARGPSGELLCQDSIAEIIYRMQNLYLGDKEREQEQNAMVLYKGDGALVPYESKKRKPRPKVDIDDETTRIWNLLMGKGDEKEGDEEKDKKKEKWWEEERRVFRGRADSFIARMHLVQGDRRFSPWKGSVVDSVIGVFLTQNVSDHLSSSAFMSLAARFPPKLSSSREDERNVRSVVVEDPEGCILNLNEIPSWQEKVQHPSDMEVSGVDSGSKEQLRDCSNSGIERFNFLEKSIQNLEEEVLSSQDSFDPAIFQSCGRVGSCSCSKSDAEFPTTRCETKTVSGTSQSVQTGSPNLSDEICLQGNERPHLYEGSGDVQKQETTNVAQKKPDLEKTMNWKDSVCFGQPRNDTNWQTTPSSSYEQCATRQPHVLDIEDFGMQGEGLGYSWMSISPRVDRVKNKNVPRRFFRQGGSVPREFTGQIIPSTPHELPGMGLSGSSSAVQEHQDDTQHNQQDEMNKASHLQKTFLDLLNSSEECLTRQSSTKQNITDGCLPRDRTAEDVVDPLSNNSSLQNILVESNSSNKEQTAVEYKETNATILREMKGTLADGKKPTSQWDSLRKDVEGNEGRQERNKNNMDSIDYEAIRRASISEISEAIKERGMNNMLAVRIKDFLERIVKDHGGIDLEWLRESPPDKAKDYLLSIRGLGLKSVECVRLLTLHNLAFPVDTNVGRIAVRMGWVPLQPLPESLQLHLLELYPVLESIQKFLWPRLCKLDQRTLYELHYQLITFGKVFCTKSRPNCNACPMRGECRHFASAYASARLALPAPEERSLTSATIPVPPESFPPVAIPMIELPLPLEKSLASGAPSNRENCEPIIEEPASPGQECTEITESDIEDAYYNEDPDEIPTIKLNIEQFGMTLREHMERNMELQEGDMSKALVALHPTTTSIPTPKLKNISRLRTEHQVYELPDSHRLLDGMDKREPDDPSPYLLAIWTPGETANSAQPPEQKCGGKASGKMCFDETCSECNSLREANSQTVRGTLLIPCRTAMRGSFPLNGTYFQVNELFADHESSLKPIDVPRDWIWDLPRRTVYFGTSVTSIFRGLSTEQIQFCFWKGFVCVRGFEQKTRAPRPLMARLHFPASKLKNNKT

SEQ ID NO: 51555 - protein, 458 aa, Streptococcus agalactiae 2603V/R
MENHRYEDEGKFQRKMTSRHLFMLSLGGVIGTGLFLSSGYTIAQAGPLGAVLSYLIGAVVVYLVMLSLGELAVAMPVTGSFHTYATKFISPGTGFTVAWLYWICWTVALGTEFLGAAMLMQRWFPNVPAWAFASFFALVIFGLNALSVRFFAEAESFFSSIKVIAIIIFIILGLGAMFGLVSFEGQHKAILFTHLTANGAFPNGIVAVVSVMLAVNYAFSGTELIGIAAGETDNPKEAVPRAIKTTIGRLVVFFVLTIVVLASLLPMKEAGVSTAPFVDVFDKMGIPFTADIMNFVILTAILSAGNSGLYASSRMLWSLANEGMLSKSVVKINKHGVPMRALLLSMAGAVLSLFSSIYAADTVYLALVSIAGFAVVVVWLAIPVAQINFRKEFLKENQLEDLSYKTPFTPVLPYITIILLLISIVGIAWDSSQRAGLYFGVPFIIFCYIYHKLRYKKW

SEQ ID NO: 51556 - protein, 259 aa, Bacillus cereus G9241
MKVACIQMDIVFGDVEKNIENAKNKISEAMKERPDVIVLPELWTTGYDLTRLSEIADRDGLETKEKLIEWSKQYGVHIVGGSIAKQTEQGVTNTMYVVTNKGELVNEYSKVHLFQLMDEHKYLIAGNSTGEFKLDDVECAGTICYDIRFPEWMRVHTAKGAKVLFVVAEWPLVRLAHWRLLLQARAVENQCYVVACNRAGKDPNNEFAGHSLIVDPWGEVVVEANEEESILFGELTFEKIKEVRKGIPVFADRRPELYK

SEQ ID NO: 51557 - protein, 95 aa, Deinococcus radiodurans
MLKPLGDRVLVEIIEEAEQKTAGGLYVPDSAKEKSQRGKVVAVGTGKTLDNGTKVAMEVKEGDTVYFAKYGGTEVSLEGKNYSLLSERDLLAIVE

SEQ ID NO: 51558 - protein, 903 aa, Magnaporthe grisea 70-15
MTTSVGNINGQHRTAAGSEDDGVDHIGIDTPRSGIATPQPDLQDKRLPSIMSSFGQVRYFFNLFSFSISSTTGLATNASSNNTVSGDERLHRSASGSASASSSPQHPDSPRILPSEVPELSEDKIPPVSFEKAAAMPSKELPSSCDGLSPYPTPPTSQRGSLQCGVLGDTSGEGGICGHTSAVAPSHSRNQSSSDVVQRQTAGPSKTLASVVTQPCSVLASHFSYKHQQSSAFVSSSPSRDEGIVASLCKKPASTAHPTKLTSEGKKSGHSTPTRSLSTAHASRSGSHEDKANGTSTGTSTPSLRSGEQVAAPKGKLTVKITEGRGVRKCRDPYVVAVCQRSELISGGPRTFEDEDELSVSTPLGGVPISRSGSDMGRTPMAIPMRSRQSSNTSVTEYNTFRNRTRRTFTRPKWDAEAVFDVNDKDMRVEITIWEHGANGEEFLGSVELEASKEVPLRGWFPLVGHADTVAENAPTGEIYVEALYEATGRKHYGPDDFEILKLIGKGTFGQVYQVRKRDTKRIYAMKVLSKKVIVQKKEVAHTVGERNILVRTATSNSPFIVSLKFSFQTPTDLYLVTDYMSGGELFWHLQKEGRFEEKRAKFYIAELILAIQHLHNNDIVYRDLKPENILLDATGHIALCDFGLSKADLAQNDTTNTFCGTTEYLAPEVLLDEAGYTKMVDFWSLGVLVFEMCCGWSPFYAEDTQQMYKNIAFGKVRFPKDTLSVEGRNFVKGLLNRNPKHRLGATNDAEELKQHPFFRDVDWNALQKRQITPPFKPKLKSETDVSYFDPEFTNALDTNGSLNERAAQLAKGVGYGNSTPLSPSVQANFQGFTFTGESTLEENMRDRYGNDDEDMDDFDRAKEDHDWDDLDDLNPRNGNRMSGIVRSTGNDEHMFSNSQFDM

SEQ ID NO: 51559 - protein, 307 aa, Triticum aestivum
  misc_feature (28)..(28): Xaa can be any naturally occurring amino acid
  misc_feature (150)..(150): Xaa can be any naturally occurring amino acid
  unsure (1)..(307): unsure at all Xaa locations
GLQDRHEGYSGGQSVLYVGDLSYADKYXRHDGGRWDSWGRLVERSTAYQPWIWNSGNHEIEYMPDLGETSTFKPYLHRYATPYLASKSRSPMWYAVRRASAHIIVLSSCSPFVKFTPQYKWLKKELKRVDREETPWLIVLMHVPMYSSYXHEYMEGESVRAAFEEWFVKYKVDLVFAGHVHAYERSYRISNINYNVTSGNRYPVPDKSAPVYITVGDGGNQEGLAWRFNDPQPDYSAFREASFGHSTLQLVNRTHAVYQWNRNDDGKHVPTDNVVFHNQYWAGNTRRRRLKKKHLRYESLQSLMSML

SEQ ID NO: 51560 - protein, 371 aa, Eriobotrya japonica
MGKGGMSDGDHADRCCGEAINGDVQQENMAAWLLGVKNLKIQPYKLPNLGPHDVRVRLKAVGICGSDVHHFKNMRCVDFIVKEPMVIGHECAGIIEEVGSEVEDLVPGDRVALEPGISCKRCNLCKQGRYNLCRKMKFFGSPPNNGCLANQVVHPGDLCFKLPDNVSLEEGAMCEPLSVGIHACRRANVCQETNVLVVGAGPIGLVTLLAARAFGAPRIVIADVNDERLSIAKSLGADEVVKVSTNIEDLAEEVATIQKVLENGVDVSFDCAGFDKTITTALSATRPGGKVCLVGMGQREMTLPLATREIDVIGIFRYQNTWPLCLEFLRSGKIDVKPLITHRFGFSQKEVEEAFETSARGGNAIKVMFNL

SEQ ID NO: 51561 - protein, 463 aa, Dunaliella salina
MQSKLLGLQDEISEARDKLRTSEARVAQNLKRVDELKAEAASLERMRLASSSSTDSTVSIASRGGAAVAATTSVPDHVEREGIQSRVRGSGMASTSYPSHVPQPSQAVRRGPKPKDSRRLRSSLELEDGLRNFWYPTEFAKKLEPGMMVPFDLFGVPWVLFRDEHSAPTCIKDSCAHRACPLSLGKVINGHVQCPYHGWEFDGSGACTKMPSTRMCHGVGVAALPCVEKDGFVWVWPGDGPPPDLPPDFTAPPAGYDVHAEIMVDVPVEHGLLMENLLDLAHAPFTHTTTFARGWPIPEAVRFHATKMLAGDWDPYPISMSFNPPCIALSTIGLSQPGKIMRGYKAEECKRHLHQLHVCMPSKEGHTRLLYRMSLDFWGWAKHVPFVDVLWKKIAGQVLGEDLVLVLGQQARMIGGDDTWCTPMPYDKLAVRYRRWRNMVADGEYEEGSRNRCTSQYDSWPDV

SEQ ID NO: 51562 - protein, 282 aa, Ustilago maydis 521
MVKTVSVEVDTILFDMDGTLIDSTPAVNATWASFAQQYNLDLSFVMQTCHGYRTVENLRRFIPSISDAELPKEVERFESNILVVAKQNAAKGQGGSIVAMPGAKELLDQINSGRPDAAVEKGNYGWAIVTSATKAYAQQGFASAGVSSPPEVFITSDLCTKGKPDPQPYLMGAEKTGQDISRCLVVEDAPPGVRAGKRAGAKTLALRTTHDGEKMQQEGADYIVEDLRSVQAKWKHDGSGLVLTIQAEQPEKGEAKGISELAKQIQLQNDPTSNTHAVNGQP

SEQ ID NO: 51563 - protein, 276 aa, Prochlorothrix hollandica
LDLGMADPLGFELFDQCWVLFRDDQGTAACILDECAHRACPLSLGKVIQGRIQCPYHGWEYDRQGECVHMPSCQAISNPILTLPVMEQGGMIWVWPGTDEPGALPSLAPTLPDNFTLQAELVMDLEVEHGLMLENLLDLAHAPFTHTGTFAKGWPVPPFVRFANAATTPWTGHWDPYPIHMTFEPPCFVISTIGLRGKDCGRHLHQVHACLPRGQGRTRLLYRLALDFGHWLRWVPGTHCLWQHLANRVIQEDLRLVQGQQERLKGGANVWNQPVG

SEQ ID NO: 51564 - protein, 314 aa, Coccidioides posadasii
MASRHTTFRLNTGEDIPAIGFGTWQDENAQEDAVLTALSAGYRHIDTAAVYGTEKAIGRALARSRLSRDELFITSKLWNNKHRPEDVEQAIDQSLKNLEIDYLDLYLMHWPAAFAPGDDMFPKDSQGNSKTVDIDYVDTYKAMEKLVKSGKTKAIGISNFSKGEMERLLESCSIVPAVMQMELHPWLQQNDFVEWLKSKGIHVTQYSSLGNQNEVYSGRERYGRLIEDPALAAIGTKYGKTGAQVALAWGITKGHSVLVKSKTPHRIQQNFESDFELKQEDMKAIENIDKKLRFNDSSADFGYNFFVGLEGKEK

SEQ ID NO: 51565 - protein, 276 aa, Prochloron didemni
QNVNTTTPMPFELFDRSWILFRDRNSNIGCIHDRCAHRACTLSLGKVVNGRVQCAYHGWEYNTEGTCEVMPSCKQTKAAVKALPAIEQSGMIWVWPGSGVPGELPKLAPAIPENFTLQAEITMELDVEHGLFMENLLDLAHAPFTHTGTFAKGWPVPDFVRFANLPKTPLTGHWDPYPIDMSFEPPCYVISTIGLRGRDCGRHLHQVHVCLPKGKGKTRLLYRLALDFYKWLRFVPGMNLFWEHMAQRVIGEDIRLVRGQQKSLQEGGNVWNQPVG

SEQ ID NO: 51566 - protein, 188 aa, Brassica napus
  misc_feature (5)..(6): Xaa can be any naturally occurring amino acid
  misc_feature (19)..(19): Xaa can be any naturally occurring amino acid
  unsure (1)..(188): unsure at all Xaa locations
VTPAXXESCFKSPLPAKAXSRRYRNGLKAWSLGSSGPSSSSSTSSSSSSSGLSSPWFSGAELLEPDFTSEKPPVPKKYKKRSAESVFSAKLQQQQPQRRCSHCGVQKTPQWRAGPKGAKTLCNACGVRYKSGRLLPEYRPACSPTFSSELHSNHHRKVIEMRRKKEPTDDSSTGLNQPVKTPQAVPSF

SEQ ID NO: 51567 - protein, 920 aa, Streptococcus pyogenes M1 GAS
MPLKKLESSNNQDIIAEEVALLKEMLENITRRMIGDDAFTVIESIMVLSEKQDYIELEKVVANISNQEMEVISRYFSILPLLINISEDVDLAYEINYQNNTDTDYLGKLALTIKDLAGKDNGKDILEQVNVVPVLTAHPTQVQRKTILELTTHIHKLLRKYRDAKAGVINLEKWRQELYRYIEMIMQTDIIREKKLQVKNEIKNVMQYYDGSLIQAVTKLTTEYKNLAQKHGLELDNPKPITMGMWIGGDRDGNPFVTAETLCLSATVQSEVILNYYIDELAALYRTFSLSSTLVQPNSEVERLASLSQDQSIYRGNEPYRRAFHYIQSRLKQTQIQLTNQPAASMSSSVGLNTSAWSSPASLENPILAYDSPVDFKADLKAIEQSLLDNGNSALIEGDLREVMQAVDIFGFFLASIDMRQDSSVQEACVAELLKGANIVDDYSSLSETEKCDVLLQQLMEEPRTLSSAAVAKSDLLEKELAIYTTARELKDKLGEEVIKQHIISHTESVSDMFELAIMLKEVGLVDQQRARVQIVPLFETIEDLDNARDIMAAYLSHDIVKSWIATNRNYQEIMLGYSDSNKDGGYLASGWTLYKAQNELTAIGEEHGVKITFFHGRGGTVGRGGGPSYDAITSQPFGSIKDRIRLTEQGEIIENKYGNKDVAYYHLEMLISASINRMVTQMITDPNEIDSFREIMDSIVADSNIIYRKLVFDNPHFYDYFFEASPIKEVSSLNIGSRPAARKTITEITGLRAIPWVFSWSQNRIMFPGWYGVGSAFKRYIDRAQGNLERLQHMYQTWPFFHSLLSNVDMVLSKSNMNIAFQYAQLAERQDVRDVFYEILDEWQLTKNVILAIQDHDDLLEDNPSLKHSLKSRLPYFNVLNYIQIELIKRWRNNQLDENDEKLIHTTINGIATGLRNSG

SEQ ID NO: 51568 - protein, 536 aa, Arabidopsis thaliana
MNAAVFSPSALSLPISFSKTRSSFLSRKKGVKGEFRVFAVFGDESGLVEKKSQWRPLFDVEDPRSKAPPYKGKFLDVNQAIEVARFDIQYLDWRARQDLLTIMILHDKVVDVLNPLAREYKSIGTVKKELAGLQEELSKAHQQVHISEARVSTALDKLAHMEELVNDRLLPGRVVTELDKPSSSTTASAVELDREKTNTGAKSLNVSGPVPPYSPHLKNFWYPVAFTADLKHDTMVPIECFEQPWVIFRGEDGKPGCVRNTCAHRACPLDLGTVNEGRIQCPYHGWEYSTDGECKKMPSTKLLKVKIKSLPCLEQEGMIWIWPGDEPPAPILPSLQPPSGFLIHAELVMDLPVEHGLLLDNLLDLAHAPFTHTSTFAKGWSVPSLVKFLTPTSGLQGYWDPYPIDMEFKPPCIVLSTIGISKPGKLEGKSTQQCATHFHQLHVCLPSSKNKTRLLCRMSLDFAPILKNLPFMEHLWRHFAEQVLNEDLRLVLGQQERMLNGANIWNLPVAYDKLGVRYRLWRNAVDRGDDKLPFSG

SEQ ID NO: 51569 - protein, 316 aa, Frankia sp. CcI3
MRAVVMDRFGGPEVLTVRDVADPVPGRGQVLVAVEYAGITFVETQVRAGRGPALRNPPPLPRVPGNGVGGQVVAVGADVDPALAGVVVVTTTGGTGGYAELAVADADDLIPVPSTVPVRDAVALLADGRTAVLLHGQAEVKPAESVLVEAAGGGLGSLLVQLSAAAGATVIGAARGTAKRELVMSLGAAAYVDYSRPGWTLEVVEATRGTGVDLVYDGVGGDIGAHALTTLRAGGRISIHGMASGSWTEPPAGVTVISGDTPTPEQMRALAAEALAQAAAGRLRPIIGQTYPLGEAAAAHQAIEDRETAGKTLLVP

SEQ ID NO: 51570 - protein, 312 aa, Glycine max
MKRLGSSDSLGALMTICPPTDEHSPRNNHAYGREFQSMLEGLDEEGCVEEPGHHSEKKRRLSVDQVKALEKNFEVENKLEPDRKLKLAQELGLQPRQVAVWFQNRRARWKTKQLERDYGVLKANYESLKLNYDTLQQDHEALLKEIKELKSRLVQEENNNNTESDVSVKEEMLTTTLCETAIPGSDTKELSYECFNKSDEVGGGSSVFHVDFKDGSSDSDSSAILNEENNNHSPNNNAAISSCGVLQSHGLLLSPSSSSMNNCFQFQKQYQTTTTQYVKMEEHNFLSADEACNFFSDEQAPTLQWYCSEEWS

SEQ ID NO: 51571 - protein, 286 aa, Gloeobacter violaceus PCC 7421
MLIRESTVRAGGRQWFYRSAGSESGPPVLLLHGLPSHSHGWREAVPVLAERGLWVIAADWVGFGGSDKPDKSAFNYTPDAFIAALAAFVDALALERFSLVVQGFLGSAGIQYALREPRRIARLAVINAPIATSAKLPWNLRQLGLPLVGEMLTQNPLSVDQTLEGGGYTVISNGDLGAFRRPYSESGDAGRALMLTVRNLDLPRAMAEIEAGLTPWRQNGPVPTPFALALIWGLRDRYLGEAMAKSFVAAHPQVEFFPVAQAGHYPLEQDPAAVNQALVRFVAQPR

SEQ ID NO: 51572 - protein, 217 aa, Zea mays
MASAPTPPPLLPVTNPAPGSSPAAAGGSDAPIATPALRLLLSRLSDTARRSLSDRRPWGELLDRSAFSKPDSLSDATSRLRRNLAYFRVNYAAVVAFALGASLLAHPFSLLILLGLLAAWCFLYLFRASDQPVALFGRTFSDRETLLGLVGASFVLLFFTSVASLIISGLLVGGALVAAHGAFRVPEDLFLDEPNAAPGNSAAQGLLSFLGAPGSGV

SEQ ID NO: 51573 - protein, 309 aa, Triticum aestivum
  misc_feature (136)..(136): Xaa can be any naturally occurring amino acid
  unsure (1)..(309): unsure at all Xaa locations
MLAMDQHNHQEESCVPPGFRFHPTEEELVGYYLARKVAAQKIDLDIIQEVDLYRIEPWDLQERCRGGRGGRGARQVAAEDEQSSEWYFFSFKDRKYPSGTRTNRATAAGFWKATGRDKPVTSSRSRGVIGMRKTLXVFYRGRAPNGRKTDWIIHEYRLQTSEHAPTQEEGWVVCRAFQKPTPNQRPSYIFPAYAAAPGLGGYYDARPWLHGRGGDLPYLQSAAGAAGAGGLGFPGFPGQGIQYSDDLLESKQSLFGNIPQLIESPPTTTAVAGGGDAGYDVVQQGQAAAGIDWNFLDSLLSTSQLHLQQ

SEQ ID NO: 51574 - protein, 318 aa, Zea mays
MASPAAGTPPFLTKTYAMVEDSATDDTISWNDTGTAFVVWRPAEFARDLLPKHFKHSNFSSFVRQLNTYGFKKVVGDRWEFANDGFRRGEKHLLAGIQRRKGTGAVAAVPVPGIPAGIPLPLSSPPTSSGGEPAVSSSPPRGSTAGVSGAVAELEEENARLRRENARLARELARARRLCDGVRQLMARYDDDQGRGGDEDPADGDEGHGGSGEGPSGPEVKPMLFGVPIGAKRLRGARGDGDDVDDGEDNDEEPDEDDERQTVRKQGVKAARRNEASDLDVLTLSVRAAAAARTGGGSRDRKSPITAHPDRSLSLGLK

SEQ ID NO: 51575 - protein, 376 aa, Prochlorococcus marinus str. MIT 9313
MKSSPQQTKTSRVRRSGSTDPVRLYLQDIGRVELLTNEEEVTLARLVQRREALLKQERKLASNQEAIKELQRLEELQQREANHSCHWPTKQEWAMAAGLTLAELQEKIETGYKTWGALTGLDPLELKRSLRAGRRAKDQMIQANLRLVVAVAKKYQQRGIELLDLVQEGTLGLERAVEKFDPTRGFRFSTYAYWWIRQGITRAIATQSRTIRLPMHITEKLNRIKRVQQEIASSQGRLASIADLAKALGLSEETVRLTLMRVPRSISLETRIGQEQDTQLGDLLEDSNATPEEKLTRNQLHNDLEILLDELSNREATVIRRRFGLEDDTPQTLTQIGEAMHLSRERVRQIETHALLKLRQPQRRCKVRDYIQNLDS

SEQ ID NO: 51576 - protein, 243 aa, Crocosphaera watsonii WH 8501
METQKEKILVVDDEASIRRILETRLSMIGYDVVTAADGEEALDIFHEAIPDLVVLDVMMPKLDGYGVCQELRKESDIPIIMLTALGDVADRITGLELGADDYVVKPFSPKELEARIRSVLRRVEKNGAPGIPSSGVIAIASIKIDTNKRQVYKGDERIRLTGMEFSLLELLVSRSGEPFSRSEILQEVWGYTPERHVDTRVVDVHISRLRAKLEDDPSNPELILTARGTGYLFQRILEPGEEP

SEQ ID NO: 51577 - protein, 395 aa, Streptococcus pneumoniae TIGR4
MNYLQDLGITGLYLCPIFESTSNHKYNTTDYFEIDRHFGDKETFRELVDQAHHRGMKVMLDAVFNHIGSQSLQWKNVVKNGEQSAYKDWFHIQQFPVTTEKLVNKRDLPYHVFGFEDYMPKLNTANPEVKNYLLKVATYWIEEFNIDAWRLDVANEIDHQFWKDFRKAVLAKNPDLYILGEVWHTSQPWLNGDEFHAVMNYPLSDSIKDYFLRGIKKTDQFIDEINGESMYYKQQISEVMFNLLDSHDTERILWTANEDVQLVKSALAFLFLQKGTPCIYYGTELALTGGPDPDCRRCMPWERVSSDNDMLNFMKRLIKIRKYASVIISHGKYSLQEINSDLVALEWKYEGRILKAIFNQSTEDYLLEKEAVALASNCQELDNQLVISPDGFMIF

SEQ ID NO: 51578 - protein, 570 aa, Arabidopsis thaliana
  misc_feature (417)..(417): Xaa can be any naturally occurring amino acid
  unsure (1)..(570): unsure at all Xaa locations
MEQLRPFFLLLAIFVASLVNAEVHFHEFVIQETPVKRLCRVHNSITVNGQFPGPTLEVRNGDSLVITAINKARYNISLHWHGIRQMRNPWADGPEYITQCPIQPGGSYTYRFTMEDQEGTLWWHAHSRWLRATVYGALIIRPPLSSPHYPFPVIPKREITLLLGEWWDRNPMDVLNLAQFTGAAPNISDAFTINGQPGDLYRCSSQETLRFLVGSGEIVLLRVINSALNQELFFGVANHKLTVVAADASYTKPFSTNVIMLGPGQTTDVLLTADQPPAHYYMAAHAYNSANAAFDNTTTTAILKYKDASCVTLQAKSQARAIPAQLPGFNDTATAAAFTAQMKSPSKVKVPLEIDENLFFTVGLGLFNCPTPNTQRCQGPNGTRFTASINNVSFVFPKQNSIMQAYYQGTPTGVFTXTDFPPTPPVTFDYTGNVSRGLWQPTRGTKAYKLKFNSQVQIILQDTSIVTTENHPMHLHGYEFYVVGTGVGNFNPNTDTSSFNLIDPPRRNTIGTPPGGWVAIRFVANNPGAWLMHCHIDSHIFWGLAMVFLVENGEGHLQSVQSPPLDLPQC

SEQ ID NO: 51579 - protein, 558 aa, Prochlorococcus marinus str. MIT 9313
MAKFVFVTGGVVSSIGKGIVAASLGRLLKSRGYSVSILKLDPYLNVDPGTMSPFQHGEVFVTEDGAETDLDLGHYERFTDTAMSRLNSVTTGSIYQAVINKERRGDYNGGTVQVIPHITGEIRERIHRVAANSGADVVITEIGGTVGDIESLPFLEAIREFRGDVGRNDLAYIHVTLLPFIGTSGELKTKPTQHSVKELRAIGIQPDVLVCRSDRPINEDLKSKIGGFCGVPNRAVITALDADSIYAVPISLEEEGLCLEMLDVLNLTDHDSDMKSWVELVHKLRNPGPAVKVALVGKYVQLNDAYLSVVEALRHACLTQDASLELSWVCAEQIETHGPENLLKGMDAVVVPGGFGNRGVDGKVAAIRWAREQRVPFLGLCLGMQCAVIEWARNQAGLTGASSSELEPDTNHPVIHLLPEQQDVVDLGGTMRLGVYPCRIAPDTLAQKLYGEQVVYERHRHRYEFNNSYRNLFIESGYTISGSSPDGRLVELIELKGHPFFTACQYHPEFLSRPGKPHPLFRGLIEAAQLRLPASPDEALRRQSQTNISAQEQPSRIG

SEQ ID NO: 51580 - protein, 94 aa, Streptococcus agalactiae
MLKPLGDRVIISFVETEEKSVGGFVLAGASHDATKTAKVLAVGDGIRTLTGELVAPSVAEGDTVLVENDAGLEVKDGNEKVTVVRESDIVAVVK

SEQ ID NO: 51581 - protein, 335 aa, Bacillus thuringiensis serovar konkukian str. 97-27
MKTYYEQDANVGLLQGKTVAVIGYGSQGHAQAQNLRDSGVEVVVGVRPGKSFEVAKADGFKVMSVSEAVRTAQVVQMLLPDEQQAHVYKAEVEENLREGQMLLFSHGFNIHFGQINPPSYVDVAMVAPKSPGHLVRRVFQEGNGVPALVAVHQDATGTALHVALAYAKGVGCTRAGVIETTFQEETETDLFGEQAVLCGGVTALVKAGFETLTEGGYRPEIAYFECLHELKLIVDLMYEGGLTNMRHSISDTAEFGDYVTGSRIVTDETKKEMKRVLTEIQQGEFAKKWILENQAGRPTYNAMKKAEQNHQLEKVGEELREMMSWIHAPKELVKK

SEQ ID NO: 51582 - protein, 138 aa, Guillardia theta
MFIIKGNDTRNKKIKKKLKNIGLDIKIRNEGKNISFIDKKCPFTGNISIRGRIMKGKIVSTKMEKTVIVRRDYLHWIPKYKRFEKRHKNIPCHCSPLFRVKEGDFVTIGQCRPLSKTVRFNVIHVEKDRRARNKKIYS

SEQ ID NO: 51583 - protein, 284 aa, Streptococcus agalactiae 2603V/R
MTTFTAKFIDQEWEVPVESGRYHMIVGEFCPYAQRPQIARQLLGLDKHISISFVDDVPSDIGLIFSQPEQVTGAKSLRDIYHLTDPTYQGPYTIPILIDKTDNRIVCKESADLLRLFTTDFSDLHQEDAPVLFSQETASLIDNDIKDINKNFQSLMYKLAFLDKQADYDTYSKEFFTFLDQKEHLLGQRPFLLGDNLSEVDIHFFTPLVRWDIAGRDLLLLNQKALEDYPNIFSWAKTLYNDFNLKTLTNPQSIKNNYYLGKFGRAVRHHTIVPTGPNMAKWEK

SEQ ID NO: 51584 - protein, 472 aa, Escherichia coli K12
MTTHLVWFRQDLRLHDNLALAAACRNSSARVLALYIATPRQWATHNMSPRQAELINAQLNGLQIALAEKGIPLLFREVDDFVASVEIVKQVCAENSVTHLFYNYQYEVNERARDVEVERALRNVVCEGFDDSVILPPGAVMTGNHEMYKVFTPFKNAWLKRLREGMPECVAAPKVRSSGSIEPSPSITLNYPRQSFDTAHFPVEEKAAIAQLRQFCQNGAGEYEQQRDFPAVEGTSRLSASLATGGLSPRQCLHRLLAEQPQALDGGAGSVWLNELIWREFYRHLITYHPSLCKHRPFIAWTDRVQWQSNPAHLQAWQEGKTGYPIVDAAMRQLNSTGWMHNRLRMITASFLVKDLLIDWREGERYFMSQLIDGDLAANNGGWQWAASTGTDAAPYFRIFNPTTQGEKFDHEGEFIRQWLPELRDVPGKVVHEPWKWAQKAGVTLDYPQPIVEHKEARVQTLAAYEAARKGK

SEQ ID NO: 51585 - protein, 452 aa, Burkholderia vietnamiensis G4
MNRTPVVDVQTFINEQPFGGFQWLVFLMCFVIVLLDGFDTAAIGFIAPSLLGEWNLSKPDLAPVLSAALFGLACGALVSGPLSDRLGRRSLLLGSVFLFGVACFASAFSTTIGHLTVLRFITGVGLGAAMPNAVTMMGEFCPDKRRATVINLMFCGFPLGAAFGGFLAAWMIPHFGWRSVLLLGGVTPLLLGVLLLLKMPESVRFMVAHGRSVERIRATLARISRDALNAGSFALTETAPQTGGKGLGVVMSRAYLAGSVMLWVAYFMGLVIFYASINWMPILLKDAGLAPKSATLISALFPLGGVGAVLCGVLMDRFNANRVIAVCYALTAISVYAIGQAAGNVGLLVLVVFVAGVLMNTAQSSMPALAAAFYPTEGRGTGVAWMLGVGRFGGIAGSFLVAELTRRHFSFASVFATIAVAGLLACVALLIKQMARPHGAAQPAGKVESLGH

SEQ ID NO: 51586 - protein, 338 aa, Oryza sativa (japonica cultivar-group)
MDDSSFFMQWAMDTLHQLPSDSTAAAAYATDVAGDSGAFPSLQALRNASAAGGGGGFRDLTVQVDQVHRANSWSSSDSPGGGAATAAAGWSPHVTGGGGRGHRPMSWNFSAASAQPTTEDSGGGGGGGVVPAPLQAMETTATARAAVKKGGGGGSSSSAAAPGYVQDHIIAERRRREKINQRFIELSTVIPGLKKMDKATILGDAVKYVKELQEKVKTLEEEDGGGRPAAMVVRKSSCSGRQSAAGDGDGEGRVPEIEVRVWERSVLVRVQCGNSRGLLVRLLSEVEELRLGITHTSVMPFPASTVIITITAKASSLSNHPALLCLYICIKLPCVISS

SEQ ID NO: 51587 - protein, 585 aa, Thermoactinomyces vulgaris
MLLEAIFHEAKGSYAYPISETQLRVRLRAKKGDVVRCEVLYADRYASPEEELAHALAGKAGSDERFDYFEALLECSTKRVKYVFLLTGPQGEAVYFGETGFSAERSKAGVFQYAYIHRSEVFTTPEWAKEAVIYQIFPERFANGDPSNDPPGTEQWAKDARPRHDSFYGGDLKGVIDRLPYLEELGVTALYFTPIFASPSHHKYDTADYLAIDPQFGDLPTFRRLVDEAHRRGIKIILDAVFNHAGDQFFAFRDVLQKGEQSRYKDWFFIEDFPVSKTSRTNYETFAVQVPAMPKLRTENPEVKEYLFDVARFWMEQGIDGWRLDVANEVDHAFWREFRRLVKSLNPDALIVGEIWHDASGWLMGDQFDSVMNYLFRESVIRFFATGEIHAERFDAELTRARMLYPEQAAQGLWNLLDSHDTERFLTSCGGNEAKFRLAVLFQMTYLGTPLIYYGDEIGMAGATDPDCRRPMIWEEKEQNRGLFEFYKELIRLRHRLASLTRGNVRSWHADKQANLYAFVRTVQDQHVGVVLNNRGEKQTVLLQVPESGGKTWLDCLTGEEVHGKQGQLKLTLRPYQGMILWNGR

SEQ ID NO: 51588 - protein, 259 aa, Candida albicans SC5314
MSTKVYSYSDSQDVANSVGKYVIEQQNKAIEANGSFKIALSGGSLGKILKQALIDNKEIGSKAQWDKWEVYFSDERLVPLYHPDSNFGLFNEMVLKNLPQETTNMKLHVIDQSLLTGKDGKLDDLVDQAKDQEIAKEYANGLPKQFDLILLGCGPDGHTCSLFPGHKLLEERDELISYISDSPKPPPRRITFTFPVLENAKAIAFVATGAGKAPVLREIFSGQSKLPCALVNDIKTGVSVSWFVDSPAVEGVDVLTSKY

SEQ ID NO: 51589 - protein, 174 aa, Zea mays
  misc_feature (67)..(67): Xaa can be any naturally occurring amino acid
  misc_feature (120)..(120): Xaa can be any naturally occurring amino acid
  misc_feature (141)..(141): Xaa can be any naturally occurring amino acid
  unsure (1)..(174): unsure at all Xaa locations
YLPLSTSTPRPESPASQRNPASSVGFQEPTRQLPSEYGAGDDVVAQSHTRKAVLLCNYILLGGSSSXIFLTLSMCLLPSPRGLLLLLLHALTAVFSAVDWSVSFTVPDTTAQRNNSAHRXGAALTGIFQGAIALLWITRTXDFLAELQSYDRDEDRADIRKIGREGSEPPSSVL

SEQ ID NO: 51590 - protein, 640 aa, Cryphonectria parasitica
MHRTVLLTLLSPSPELKKTHLSSPLSSFGRSPSQSTITDKDAKAQPQSGPSGTAPSPTPPDNNIASSEALTQTPVEFAPKPGILVVTLHEGRGFALPEPHKNIFSSHSTSASQGGGASIAGSVRTAPNGHRPNTSGGFGNVPTNHGRVSGKYMPYALLDFDKVQVFVNSVEGNPENPLWAGSNTQYKFDVSRVTDVTVHLYIRNPTAPPSVGRANDIFLGVVQIKPRFEEKHQFVEDPKANKKDREKAATEFAEKEKALGHSGVQWVPVGYGQGELKIGIEYVENRAGKLTIDDFDLLTVVGKGSFGKVIQVRKKDTSRIYALKTIRKAHIISRSEVTHTLAERSVLAQINNPFIVPLKFTFQSPEKLYFVLAFVNGGELFHHLQKEQRFDVNRSRFYTAELLCALECLHGFNVIYRDLKPENILLDYQGHIALCDFGLCKLDMKDEDRTNTFCGTPEYLAPELLMGQGYNKTVDWWTLGVLLYEMLTGLPPFYDENTNEMYRKILGEPLHFPSHDIVPPAAKDLLTKLLNRDPAQRLGANGSAEIKAHPFFHAIDWRKLLQRKYEPTFKPNVAGAMDTDNFDPEFTREAPQDSYVGGVPLSETMQNQFQGFSYNRPIAGLADGGGSVKDPSFIGSVTGR

SEQ ID NO: 51591 - protein, 695 aa, Zea mays
  misc_feature (319)..(319): Xaa can be any naturally occurring amino acid
  misc_feature (350)..(350): Xaa can be any naturally occurring amino acid
  unsure (1)..(695): unsure at all Xaa locations
MEMNSSGEETVVKVRKPYTITKQRERWTEAEHKRFLEALKLYGRAWQRIEEHVGTKTAVQIRSHAQKFFTKLEKEAMNNGTSPGQAHDIDIPPPRPKRKPNSPYPRKSCLSSETQTKELPNDKSTKPNMPLSNGHVKMVGDASLQNFQRKELSEKGSRSEVLNLFRDAPSASFSSVNKSSSNHGAPRRTEASKTESRDMSIMENNSFNPNTQEDVKVISDQEMERLNGIQIRSKCEHSHEGYLDISTQQMKLMPKSVETTYVDEQTARASHTLAESNGTASVPVTVPEGTHPDQTSDQVGINGSMNPCIHPMVSADPKXFGSSATPQTFPHNYAAFAPMMQCNCNQDTYXARLAASYWPAAEGNTPIDPNQENPADGVQGRNIGSPPSMASIVAATVAAASVWWATQGLLPFFAPPVAFPFVPAPSAAFPTVDVPRPSEKDRDCPVENAQNECQEARKQVQFEGLRVAASSESDGSGKGEVSLHTELKLSPAQNADATPTTGAGTNDAFRNKKKQDRSSCGSNTPSSSDVDAGNVPEEDNANEKAKQASCSNSSAGDTNHRRFRSNGSTSDSWKEVSEEGRLAFDALFSREKLPQSFSPPQAVDSKEVAKEEEDEVTTVAVDLNKNATSIDHDDLDTMDEPRASFPNELSHLKLKSRRTGFKPYKRCSVEAKENRVPTSDMVGTKRIRLDSEAST

SEQ ID NO: 51592 - protein, 282 aa, Rubrobacter xylanophilus DSM 9941
MAYATEDVLTQYLGRIREGRLLTAGEEVELSRRARAGDGAARRRLIESNLRLVVAIAKRYRGRGVPFEDLIQEGNAGLIRAVEKFDPEMGNRFSTYATWWIRQAVTRAVADQGRAVRLPAHVVDSVYRLRRAESALSVELGREPTDEEVAGRLGTSPEEARRLREVSQPISSISARLGDEEDGAELGDLLPDEAASEEYARVEAGPWRGVLREAVGSLPEREARVLRLRHGLDGERARTLREVSEILGISQERARQVELKALRTLRSGRYAGSLRRGLSEAV

SEQ ID NO: 51593 - protein, 240 aa, Arabidopsis thaliana
MGRGKIAIKRINNSTSRQVTFSKRRNGLLKKAKELAILCDAEVGVIIFSSTGRLYDFSSSSMKSVIERYSDAKGETSSENDPASEIQFWQKEAAILKRQLHNLQENHRQMMGEELSGLSVEALQNLENQLELSLRGVRMKKDQMLIEEIQVLNREGNLVHQENLDLHKKVNLMHQQNMELHEKVSEVEGVKIANKNSLLTNGLDMRDTSNEHVHLQLSQPQHDHETHSKAIQLNYFSFIA

SEQ ID NO: 51594 - protein, 325 aa, Methylococcus capsulatus str. Bath
MKTPVHVAVTGAAGQIAYSLLFRIAVGDLFGPHQPVILKLLDVPSAERVLEGVAMELDDCASPLLQEIEVSSDPAEVFDGAEAVFMLGATPRGPGMERRDLLQVNADIFSAQGRALNESASRRVKILVVGNPANTNALIAQRNAPDLAPGCFSAMTRLDHNRATSLLARHCGCNVAEISRVVIWGNHSPTQYPDLHHARVKGKPALSLVDPAWYVETFIPTVQQRGASVIAIRGKSSAASAANAALDHMRSWFLGTPKDDWVSMTVSSDGSYGIAEGLMFSFPVTIENGRFRIVQDLPLDTFSRERLRLTEVELLEERAMVSHLL

SEQ ID NO: 51595 - protein, 545 aa, Piscirickettsia salmonis
MSAKEVRFGTGSRQKMLDGVNLLANAVKVTLGPRGRNVILEKSFGAPTITKDGVSVAKEIELSDKFENMGAQMVKEVASKSNDDAGDGTTTATVLAQAIIQEGVKSVAAGMNPMDLKRGIDKATIAAVAALKDLSTPCTDNKAIAQVGTISANSDEEIGSIIAKAMEKVPTDGVITVEEGSSLENELDVVEGMQFDRGYLSPYFVNKQEKMIAEIESPFILLVDKKISNIRELLPTLESVAKSGKPLFIIAEDVEGEALATLVVNNIRGIVKVCAVKAPGFGDRRKAMLEDIAILTGGTVISEEVGLDLEKATLEHLGTAKRIVVTKDNTTVIDGAGEQNAIEARVTQIRAQVEETSSDYDREKLQERVAKLSGGVAVIKVGAATEIEMKEKKDRVDDALHATRAAVEEGVVPGGGVALVRAMAAVKALDFANDEQAQGANILLRAMSAPLRQIVENAGSEAAVILDKIVNGEGNFGYNAATNEFGDMIEMGILDPTKVTRSALQNAASIAGLMITTEAMVAELPKEDSAGGAGMPDMGGMGGMM

SEQ ID NO: 51596 - protein, 127 aa, Triticum aestivum
GPNVAQSQLVCTGCRNLLMYPAGATSVCCAVCSTVTAVPAPGTEMAQLVCGGCHTLLMYLRGATSVQCSCCHTVNLAMEANQVAHVNCGNCRMLLMYQYGARSVKCAVCNFVTSVGASPGAEQKPSS

SEQ ID NO: 51597 - protein, 545 aa, Zea mays
  misc_feature (355)..(355): Xaa can be any naturally occurring amino acid
  misc_feature (492)..(492): Xaa can be any naturally occurring amino acid
  misc_feature (508)..(508): Xaa can be any naturally occurring amino acid
  misc_feature (530)..(530): Xaa can be any naturally occurring amino acid
  unsure (1)..(545): unsure at all Xaa locations
MASSTGSLEHGGFTFTPPPFITSFTELLSSAGDMLGAGADQERSSPRGLFHRGARGVPKFKSAQPPSLPISPPPMSPSSYFAIPPGLSPAELLDSPVLLHSSSNILASPTTGAIPAQRFDWKKAADLIASQSQQDGDSRAAAGGFDDFSFHTATSNAVRAHTTTTSLPSFEEEQQQQVEKAAVPSSNRASGGGNGNTKLEDGYNWRKYGQKQVKGSENPRSYYKCTYHSCSMKKKVERALADGRITQIVYKGAHNHPKPLSTRRNSSGGGAAAEELQAGNSSLSAAAAAGCTGPEHSGATAENSSVTFGDDEAENGSQRSDGDEPDAKRWYVRDPARASERDSLFATRGPRFTSXACITTVSSCSCNSCIYVCLIRKQEDGENEGSSAGAGGKPVREPRLVVQTLSDIDILDDGFRWRKYGQKVVKGNPNPRSYYKCTTAGCPVRKHVERASHDTRAVITTYEGKHNHDVPVGRGAASRAAAAAAAGSGALXPPAAASSAISSSSSSXPYTLEMLSSGSYGGGGGGWSRXEDEPRDDLFVDSLLC

SEQ ID NO: 51598 - protein, 226 aa, Gloeobacter violaceus PCC 7421
MADDDSRTGRAHYASPAIRAYLDGLYLPPDPDLAHAVAELDRVGMPRIQVSATEGKILYLLVQMIRARRVVEFGTLSGYSGLWILKAMGRDGHLWTCEYNPEHARVARGVFERAGYGPQVSIFEGPGLASLDKLAHFAPFDAVFLDADKSGYARYARWAFEHLRPGGLIIGDNTYLFGYLAGREPDNQWNAQAIETMRDFHAFVASHCTAVSLPTPDGLTVGMKPY

SEQ ID NO: 51599 - protein, 506 aa, Lactococcus lactis subsp. lactis Il1403
MSLSQTSRCRINFIRERILENSSNSTTETQVKRGLKSRHVSMIALGGTIGTGLFLTSGDVIHTAGPFGALTAYVLIGAMVYFLMTSLGEMATYLPTSGSFSDYGTRYVDPAFGFALGWNYWLNWAITVAVDLTAVALCIKFWLPDVPSWIFSLIALIIVFAINALSVKTFGETEYWLSAIKITVVVLFLIIGFLSIFGIMGGHIDVAKNLSVGNHGFVGGLGSFTTGGGILGVLLVAGFSFQGTELLGITAGEAENPEKSIPKAMNSIFWRILVFYILSIFVMAAIIPFTDPHLVGGNSAAQSPFTIVFERVGLSIAASIMNAVVLTSVVSAANSGMYASTRMLYSLAKDGGAPKIFSKTSKNGIPFIALLATTAIALLTFLTSIYGVSFFTFLVSASGLTGFIAWIGIAISHFRFRRAYVAQGKDVKKLPYHAKLFPFGPILALIMTVLVTLGQDPMLLFGKTWVQGVIMYAAIPLFFILYLGYKFKNKTKLIPLKEVDLSRHKD

SEQ ID NO: 51600 - protein, 1064 aa, Shewanella sp. MR-4
MEAITMFKASEVLAGRYDSANLDELFKAVTDNYIVDEEQYLSELIKLVPSSDEAIERVTRRAHELVNKVRQFDKKGLMVGIDAFLQQYSLETQEGIILMCLAEALLRIPDAATADALIEDKLSGAKWDEHLSKSDSVLVNASTWGLMLTGKIVKLDKKIDGTPSNLLNRLVNRLGEPVIRQAMMAAMKIMGKQFVLGRTMKEALKNSEDKRKLGYTHSYDMLGEAALTRKDAEKYFNDYANAITELGAQSYNESESPRPTISIKLSALHPRYEVANEDRVLTELYDTVIRLIKLARGLNIGISIDAEEVDRLELSLKLFQKLFNSDATKGWGLLGIVVQAYSKRALPVLVWLTRLAKEQGDEIPVRLVKGAYWDSELKWAQQAGEAAYPLYTRKAGTDVSYLACARYLLSDATRGAIYPQFASHNAQTVAAISDMAGDRNHEFQRLHGMGQELYDTILSEAGAKAVRIYAPIGAHKDLLPYLVRRLLENGANTSFVHKLVDPKTPIESLVVHPLKTLTGYKTLANNKIVLPSDIFGSDRKNSKGLNMNIISEAEPFFAALDKFKSTQWQAGPLVNGQTLTGEHKTVVSPFDTTQTVGQVAFADKAAIEQAVASADAAFATWTRTPVEVRASALQKLADLLEENREELIALCTREAGKSIQDGIDEVREAVDFCRYYAVQAKKLMSKPELLPGPTGELNELFLQGRGVFVCISPWNFPLAIFLGQVSAALAAGNTVVAKPAEQTSIIGYRAVQLAHQAGIPTDVLQYLPGTGATVGNALTADERIGGVCFTGSTGTAKLINRTLANREGAIIPLIAETGGQNAMVVDSTSQPEQVVNDVVSSSFTSAGQRCSALRVLFLQEDIADRVIDVLQGAMDELVIGNPSSVKTDVGPVIDATAKANLDAHIDHIKQVGKLIKQMSLPAGTENGHFVSPTAVEIDSIRVLEKEHFGPILHVIRYKASELAHVIDEINSTGFGLTLGIHSRNEGHALEVADKVNVGNVYINRNQIGAVVGVQPFGGQGLSGTGPKAGGPHYLTRFVTEKTRTNNITAIGGNATLLSLGDSDA

SEQ ID NO: 51601 - protein, 447 aa, Triticum aestivum
QNGNTGYDDIRAAIKEAKEVKDKPTLIKVTTTIGYGSPNKASTHSVHGSALGSKEVEATRKNLSWAHEPFHVPDEVKRHWAHHLDEGASLEAEWNAKFAEYEKKYQHEAAELNSIVSGKLPDGWDNALPKYTPESPADATRNLSQQCLNALAKVIPGFLGGSADLASSNMTLLKMFGDFQKDTPEERNIRFGVREHAMGAVCNGIAVHSPGLIPYCSTFFVFTDYMRAPIRLSALSESGVIFVMTHDSIGLGEDGPTHQPVEQLFSLRAMPGILMLRPADGTETSAAYRIAVINRKRPSILALSRQKLPQLEGTSVEGVAKGGYVISDNSSGNKPDLILISTGSELEIAEKAAGQLRKEGKSVRVVSLVCWELFEEQPEEYKESVLPSEVTSRISIEAGVTLGWEKYIGQKGKAIGIDRFGSSAPAGRIYKELGLTVENLIATAKSL

SEQ ID NO: 51602 - protein, 307 aa, Ralstonia solanacearum
MATGLYTHPEFLKHEMGHHHPECPDRLRAIEDQLIASRIEQFLVPCEAPPATEAQLCRVHRPEYVRELVASVPIAGYAPIDPDTAMNPHTYMAAVLAAGAAVQATDKVIAGALENAFCCVRPPGHHAEPGRAMGFCFFNNVAVAARHALDHHGLARVAIVDFDVHHGNGTEAAFRDEPRVLMCSFFQHPFYPYSGTEGVAANMVNIPLPAYTNGLTVREVVETIWLPRLDAFRPEMLFISAGFDAHREDDLGQMGLVEADYAWITRQLMQVARAHAKGRIVSCLEGGYNLSALGRSVVAHVKALAEL

SEQ ID NO: 51603 - protein, 334 aa, Gloeobacter violaceus PCC 7421
MWSCTTRQSAMILVTGGAGYIGSHVVLALQAAGFEILVYDNLVYGHAEFVPAPMLIRGDLEDRVGLARLFAAHPIEAVIHMAAYAYVGESVTKPAVYYRNNVHGTLCLLEAMVEADVKQIVFSSTCATYGEPEQIPITETHPQRPINPYGFTKLVVERMLRDFDRAYGLRSVVFRYFNAAGADPDARVGEDHDPETHIIPLVLDVAIGRRPHITVFGSDYETPDGTCVRDYIHVSDLADAHVLGLKYLKSGGPTEVFNLGNGSGFSVQQVIDTAGQVAGREIAVQMGARRPGDPATLVGSAERARAILGWQPRFADLQTIVSTAWTWHQKRFGG

SEQ ID NO: 51604 - protein, 540 aa, Streptococcus agalactiae
MAKDIKFSADARSAMVRGVDILADTVFVTLGPKGRNVVLEKAFGSPLITNDGVTIAKEIELEDHFENMGAKLVSEVASKTNDIAGDGTTTATVLPQAIVREGLKNVTAGANPIGIRRGIETAVSAAVEELKEIAQPVSGKEAIAQVAAVSSRSEKVGEYISEAMERVGNDGVITIEESRGMETELEVVEGMQFDRGYLSQYMVTDNEKMVSELENPYILITDKKISNIQEILPLLEEVLKTNRPLLIIADDVDGEALPTLVLNKIRGTFNVVAVKAPGFGDRRKAMLEDIAILTGGTVVTEDLGLDLKDATMQVLGQSAKVTVDKDSTVIVEGAGDSSAIANRVAIIKSQMEATTSDFDREKLQERLAKLAGGVAVIKVGAATETELKEMKLRIEDALNATRAAVEEGIVSGGGTALVNVIEKVAALKLNGDEETGRNIVLRALEEPVRQIAYNAGYKGSVIIARLKQSEIGTGFNAANGEWVDMVTTGIIDPVKVTRSALQNAASVASLILTTEAVVANKPEPEAPTAPAMDPSMMGGF

SEQ ID NO: 51605 - protein, 220 aa, Lactobacillus johnsonii NCC 533
MLKGLIFDLDGVLTNSAVYHLTAWNNLAKELGINLTDDQLDSLRGISRMDSLNLILKYGDQEDKYSEAEKEKFAAEKNTKFVEQVEKMTPADILPGIPELLSDAKKQNLKMVIASASKNAPKILTKLGIMDEFDGIVDPATLHHGKPDPEIYEKAQELAGLNADEVISFEDAQAGVQSIKSAGQFAVGIGDKEVLKEADYIVPTTKELKLSEIESVFNKK

SEQ ID NO: 51606 - protein, 382 aa, Pseudomonas syringae pv. tomato str. DC3000
MQQSPSTSRPQLGIGLIGTGFMGRAHALAFGSANAALELPARIHLAALADADSARAEQCAQAWGFDRSHADWQQLVEDPRVQIVAITTPNHLHFPMAMAAIAAGKAVYCEKPLAVSLAQADEMQRSAKAAGVVTQVGYNYQHNPMIGLAREMIEAGELGDIVSFQGEFSEDFMGSATSPWSWRCEAAHAGGALADLGSHLLAMARYLLGDIEAVCADANTVHSQRPASPGSNEMRAIAVDDQTHALLRFASGARGTFSSSWLKHGYKNHLSFEISGTQGTLTYDQERLNELRIYRPGAPGRDGFQRLLAGPAQPGYAAFCPAPGHQLGYNELKALEVQALILAVCGQGSRGPDFEEAWQIERLATAIRLAAHEQRWVALDDI

SEQ ID NO: 51607 - protein, 538 aa, Lactobacillus johnsonii NCC 533
MTPWWKKAVVYQVYPKSFQDSNGDGIGDIPGIISRLGYLEKLGIDAIWLSPVYLSPGVDNGYDISDYQKIDPQYGTMADMDNLIREAKKHHIRIIMDLVVNHTSDQHPWFIEARKSKENPYRDFYIWHDPVEGHEPNELKSAFSGSAWKFDEKTGQYYLHFFADQQPDLNWKNPKLRNKIYEMMNYWIDKGIGGFRMDVIELIGKDPDKKIRENGPMLHPYLKEMNENTFAGKELMTVGETWNSTPKIAAEYSDPARHELSMVFQFENQGLDQQEGKEKWDLRPLDLGELKKVLVKWQTEIDFNHAWNSLFCENHDIPRVISRWGNDKEYRVQSAKMFAIVLHLMHGTPYIYNGEEIGMTNCPVKSIDEVEDIESINMYRERIDKGYSKDELIKAINTKGRDNARRPMQWSNGENADFTTGTPWLKLNPNYKTINVKEALEDPNSIFYTYQKLIKLRHENSVVVDGDFELVENTSDNILAFWRKLEDENWLVVANLSGEDQNLNLDIPFKEVLISNYEKRDSLKDMVLKPYEAFAVKA

SEQ ID NO: 51608 - protein, 528 aa, Porphyra purpurea
MSKQILYQDDARKALEKGMDILTEAVSVTLGPKGRNVVLEKKFGAPQIVNDGVTIAKEISLEDHIENTGVALIRQAASKTNDVAGDGTTTATVLASAIVKQGMRNVAAGSNPMAIKKGIEKATNFVVSKIAEYAKPVEDTTAIVQVASISSGNDAEVGKMIADAIDRVGREGVISLEEGKSTSTSLEITEGMQFEKGFISPYFVTDLDRMEVLQENPFILFTDKKITLVQQELVPLLEQIAKTSKPLLIIAEDIEKEALATIVVNKLRGILNVVAVRAPGFGDRRKSLLEDMSILTGGQVITEDAGFSLDTVQLDMLGKARRVVVTKDSTTIIADGHEATVKSRCEQIKRQIETSDSLYEREKLQERLAKLSGGVAVIKVGAATETEMKDKKLRLEDAINATKAAIEEGIVPGGGSTNVHISGELFVWAKNNLFEDELIGALIVQRALTYPLRRIAFNAGDNGAVVVEKVKTNDFCIGYDASNGKIVNMYDAGIIDPAKVARSALQNATSIAAMVLTTECIVVDKLEA

SEQ ID NO: 51609 - protein, 2682 aa, Rhodopseudomonas palustris CGA009
MSDSNEIGFAIVGLSGRFPGAPDVQKFWQNIKAGRTSVSRFSPEELEDSFADQERADPDFVAAKPVLDDVDLFDSDYFGMSPREADLTDPQQRIFLEICSEALDDAGYDPERYQGAVGVFAGSSLNTYFLRHVCPDRAALERFTSNFQVGSYSELLGTLNDFIATRVAYKLNLKGPAVSVQSACSTSLLAVAQACESLAALQCDMALAGGVSVTFPQKRGYIYQDGGIASRDGTCRPFDVDAAGTVFGSGAGVVAIKRLADAVADRDAIYAVIRGYGINNDGAAKVGFAAPSVGGQAECIAAALAMAGFEAETIGYVECHGTGTPLGDPIEIEGLSQAFAEASTGAIEDRNCALGSVKANVGHLDAAAGVTGLIKTALILHHGVLPPQANFAEPNPRLDLAKRGFRVATELQEWPRGDAPRRAGVSAFGVGGTNVHLCLEESPPAAAESLLPVENAVVLRLSARSPTALEAMRLRLADHLEAAVQRGERIGLNELAHTLAAGRRTFDRRWAVAVNSVQGAVQSLREVRSDPRPTSLRPGAVFMFPGQGAQYPGMGRWLFESDREFRADVELGAAIVKEHLGVDILAVLFDDRDDDDHAIRSTTLAQPALFLIEYALAQRLLRSGIEPKAMIGHSLGELVAAALAGVMSYQDALKLVVHRGRIMQAQPPGAMLSVRLAASELAAHLPVGVEIASDNSPRLSVASGPFEAVEELECRLERAEIPHRRLHTSHAFHSAMMDPVAVELEKVAAGIPLRPPKRRLISTVTGAWMTAAEATSPAYWARQCREPVSFRAALTTLIDTISERVDCLLVEVGPGRTLATFAGASSSVSKVRAIITTAPDYVERNDEELTFAQALGDLWVHGARLKSDVRPAAGTARLRLPSYPFERTRHWIARPAPVNLDISMPVASAQGDSFPRTEPPQEASSDQGGLHSVSMESKMSGDEVSKALIKALAAILSDVSGRPLSDQDAATSFISLGFDSLLLGQVAQRVNKSFGVKITFRQLMRDLNSLDALAAMLKTSAPADKLPQVERAAVKPQVAMMQRPAEAVLPKDPPVPVMAGATGVEALLREQLQSMERIFAAQLAAVGKEGRVAAELPVTAVPANSGEAPSPDNSPDKALVMPDTGEEGGGRFKIYRPGAGDGDLALAPEQRAYIENLVQRYNDRTPGSKARAQASRRVLADPRTASGFNAQWKEIVYPIVCKRSKGASIWDVDGNEYIDLVNGYGQTMFGHVPPFVAAALQAQLDDGFAIGPQTELAGEVAARISAMTGNERVAFCNTGSEAVMAAIRVARAVTGRLKVVVFSGAYHGQFDEVLIKSCRAGSVPGALPIASGIPAENVGQMIVLPYGHPVSLEIVRQMADDLAAVIVEPIQSRHPALQPRDFVASLRELTAKSGTALVFDEVVTGFRVDPGGMQKVFGIKADMATYGKVLGGGMPIGVVAGRADFMDALDGGFWQYGDESEPEVAPTFFAGTFVRHPMVLAAARAVLEHIERNKAEIYAPLAQRTGQLVDRINSHLDSYGLPTRAETCASWFFVDGSPLGRFAGLLFAELRLQGIHVHEGFPCFLTTAHEAAQCQAIDGAFERAIGAFADAGLSTGETKGITRKSSLIGDDQAQPQPQKFKTVPLTEPQMEVLLAAQMGDAASMAFNESVSIRFNGTLVESALIKAVEEVVRRHEALRSRVVDFTGMLEINPDFVPEVPIIALDGEDADTELAQWLAKDARTPFDLFNGPLVRASVLRLGADVHVLVFTAHHIICDGWSMNVLLGDLAEIYNAYRDGKAPSLVPAASFAEHAAERPRPSASTIEFWRKQFENVPVASELPLDRPRPEVKSFFGASLRERLGQDLCRDARELAKRQGVTLFTVLFASVQTLFARLCDNERVVLTVPMGGQALLDRQDLVGHCVNFLPVPVTARSAVSFCDHLRHVDEKLNEIFDHQDYTLGSLVRDLDIPRSINRTPLSDIQFNLERVGSRLTFRGVDTRVDTNPKAFVNFDIFINMIETDDDLTIEVDYATDLLDRATVSRWLDQLRKILAQALERPEIKLQELKLQNPVVIGLESGQTTTLQAARFDIPLVEMIERNCDRTPDAIAVEYETDVLRYRELDSRSNRIADRLRALAPTKGARVAVAVQRGIDLPVALVAVAKAGLAYVPVDPSLPVVRIRQMAEAAEVAVFITSGADCPVAAEMGVPVIDLERDAAQIDAASSARPEPAPPQEVLDSTAYVIFTSGSTGTPKGVEISHRALANFLGSMAVRPGFGADDRIVAVTTVSFDIAVLELLLPLYCGGRTVICGKDRLLEPDSIVRLIKTSSATIVQATPTLWRVLLEAGLQPSRPLRALSGGEALPRDVAEKLIAAGFELWNMYGPTETTIWSACGRIVDASRPIVIGEPVANTDLYILSDDGTQAPVGTPGELCIGGLGLAKGYVNRPDLTAAAFPVTSLQDGRTVRLYRTGDLAVRLSDGGIQLLGRRDQQVKIRGFRIELEEIESVLRTCPDIVDAAVMVENAGTADAALVAAFVAKPGMAVSIDSLQQTAQLSLPHYMVPNRFVAVAELPKTANGKLDRKALSATIVSPSIVVNFIEKAELRDEPAPDVLTKVIAIVEAALNRTGIKPDDRVFALGATSLHVFRMAARFSEAQLPIRAQDLMTNPSMSDLARRASVAARAQTSDKKTPSLAEFRRPSSRARTT

SEQ ID NO: 51610 - protein, 459 aa, Bacillus licheniformis ATCC 14580
MKTKVSAVLFLSFFLAASALAAEPTVQSVNDSVNMTWVAIGTLLVFFMHAGFAMVESGFTRAKNTLNILMKNFLTISIGSILYFFAGYAFMFGDSAGGFIGTSGFALAGDQDVGFFVFQAVFAATCATIISGAVAERMKLGSYMILTLFMTGLIYPVVGHWTWGEGWLYDLGFVDFAGSSIVHLTGAAGAVAAVMFLGPRIGKYTNGKVNAIPGHSIPLGALGVFILWFGWFGFNGGSTLAADPAAVPHVITTTLLAASGGVVSSALFTYFRYGRIDPSLTLNGALGGLVGITAGADGVSFTGSILIGFIAGVILVVGVQFIDQVLKLDDPVGALAVHGICGVWGTLAVGLFNTSSGLFYGGGAAQLGIQAVGILSIAAWTLAATYAVAAAMKALAPIRVSKEEEISGLDYAEHGSSAYEYKESYIDQDDVDVSSAFGTDLVSRLNNLKPGPSSKTEQV

SEQ ID NO: 51611 - protein, 505 aa, Cicer arietinum
DKVPHSSSSSKVANKAIQQSNLSFSSSHLSGDKIVTLSGAGRGRCTRKHVIVTPKAVSDSQNSQTCLDPDASRSVLGIILGGGAGTRLYPLTKKRAKPAVPLGANYRLIDIPVSNCLNSNISKIYVLTQFNSASLNRHLSRAYASNLGGYKNEGFVEVLAAQQSPENPNWFQGTADAVRQYLWLFEEHNVLEFLILAGDHLYRMDYEKFIQAHRETDADITVAALPMDEKRATAFGLMKIDEEGRIIEFAEKPKGDQLNAMKVDTTILGLDDERAKEMPFIASMGIYVISKNVMLDLLSDKFPGANDFGSEVIPGATSIGMRVQAYLYDGYWEDIGTIEAFYNANLGITKKPVPDFSFYDRSSPIYTQPRYLPPSKMLDADITDSVIGEGCVIKNCKIFHSVIGLRSCISEGAIIEDTLLMGADYYETDADKRFLAAKGSVPIGIGRNSHIKRAIVDKNARIGENVKIINSDNVQEAARETDGYFIKSGIVTVIKDALIPSGTVI

SEQ ID NO: 51612 - protein, 540 aa, Lactobacillus johnsonii NCC 533
MTKYIFVTGGVVSSLGKGISASSLGRLLKNRGLKVTMQKFDPYINIDPGTMNPYQHGEVYVTDDGTEADLDLGHYERIVDVRTSKYSNVTTGKIYQEVLDKERRGDYHGATVQVIPHITDMIKKKIMRAALTTDSDVIISEIGGTVGDIESTPFMEAIRQMRREVGEENVMYIHCTLVPYLHAAHEMKTKPTQHSVAELRSIGIQPNMLVLRAEKPIAQELKNKISTFTDVPVDRIIESIDAPSLFDLPLAFQAQGMDQKVCDFLHLESPKPEADMEAWKKLDERAKNLKNETTITLVGKYVELEDAYISVTDALQHAGYLYDTKIKVNKVQAEDITEDNIAEIMKDSDGLIVPGGFGTRGLEGMITSIKYAREHDIPFLGICLGMQMASVEFARNVLGLKDANSAEANPDTKNNIIDIMADKRDEENIGGTLRLGLYPATLKKGTKTREAYDDQDVIQERHRHRYEFNNEYREAFEKAGMVFSGVSPDNHLVEIIEIPNKKFFIAAQYHPEFLSRPQRPEGLFKAFIGAASGLPAQHFN

SEQ ID NO: 51613 - protein, 449 aa, Candida albicans SC5314
MVDRKRTAAIRAEDDDEENDNVPLQKKVKIEAKQKEEEEDGDKSGATETKSEVKQESKEETTQKENNEEDEEEEEEEDDEEAEEEKKRITNFNFDGEIYTFKERPSVIEEKEGKIEFRVVNNDNSRENLIVLTGLKNIFQKQLPKMPREYISRLVYDRSHLSMAVVRKPLTVVGGITYRPFNNRGFAEIVFCAISSTEQVRGYGAHLMNHLKDYVRATSPIKYFLTYADNYAIGYFKKQGFTKEISLDKSVWMGYIKDYEGGTLMQCSMLPSILRYLDSGKILLLQKAAIERKIRSRSKSKIVRPGLQVFKTNKNVTLDPKDIPGLAEAGWSEEMDKLAQKPKRGPHYNFMVTLFSEIQNHPSAWPFAVAVNKEEVPDYYRVIEHPIDLATIEQKLENNLYLKFTDFVDDLKLMFNNCRAYNSETTTYYKNANKLEKFMNNKLKDCSFV

SEQ ID NO: 51614 - protein, 116 aa, Brassica napus
MGSTPAEVPCEDVADNRSGVGGGISDVYGEDLATLDQLVTPWVTSVASGYSLMRDPRYNKGLAFTDKERDAHYLTGLLPPVVISQEVQERKLMHNLRQYTVPLQRYMALMDLQEKE

SEQ ID NO: 51615 - protein, 521 aa, Arabidopsis thaliana
  misc_feature (112)..(112): Xaa can be any naturally occurring amino acid
  unsure (1)..(521): unsure at all Xaa locations
MDMAFTHVCLWTLLAFVLTWTVFYVTNRKKKAPELADAAAEERRDSAADVIIVGAGVGGSALAYSLAKDGRRVLAIERDMREPERMMGEFMQPGGRLMLSKLGLEGWSLLIXLQKGTGDGRLITTGKRSWLHLFRGGRTKIFPYDPSARTFHNGRFVQRLRQKASSLPSVRLEEGTVKSLIEEKGVIKGVTYKNKAGEETTALAPLTVVCDGCYSNLRRSLNDNNAEVLSYQVAYISKNCRLDDPKNLHLIMSKPSYIMLYQLSSTDVRCGFELFSANFPSIAKGEMATFAKNTLAPQVPPKLRKIFLKGLDEGAHIKAVPAKRMTASLTKKNGLIVLGDAFNMRHPSVAAGMMVLLSDILILRRLLQPLSNLGDANKVSEVIKSFNIIRKPMSATVNTLGNAFSQVLIASTDEAKEAMRQGCYDYLSSGGFCTSGMMALLGGMNPRPLSLIYHLCAITLHSIGHLLSPFPSPLSIWHSLRLFGLALKMLVPHLKAEGVSEMFFPANAAAYRKSYMAASGL

SEQ ID NO: 51616 - protein, 406 aa, Escherichia coli O157:H7 EDL933
  misc_feature (128)..(128): Xaa can be any naturally occurring amino acid
  misc_feature (131)..(131): Xaa can be any naturally occurring amino acid
  misc_feature (318)..(318): Xaa can be any naturally occurring amino acid
  unsure (1)..(406): unsure at all Xaa locations
MKRAVITGLGIVSSIGNNQQEVLASLREGRSGITFSQELKDSGMRSHVWGNVKLDTTGLIDRKVVRFMSDASIYAFLSMEQAIADAGLSPEAYQNNPRVGLIAGSGGGSPRFQVFGADAMRGPRGLKXVGXYVVTKAMASGVSACLATPFKIHGVNYSISSACATSAHCIGNAVEQIQLGKQDIVFAGGGEELCWEMACEFDAMGALSTKYNDTPEKASRTYDAHRDGFVIAGGGGMVVVEELEHALARGAHIYAEIVGYGATSDGADMVAPSGEGAVRCMQMAMHGVDTPIDYLNSHGTSTPVGDVKELAAIREVFXDKSPAISATKAMTGHSLGAAGVQEAIYSLLMLEHGFIAPSINIEELDEQAAGLNIVTETTDRELTTVMSNSFGFGGTNATLVMRKLKD

SEQ ID NO: 51617 - protein, 228 aa, Staphylococcus aureus subsp. aureus MRSA252
MPKLILCRHGQSEWNAKNLFTGWEDVNLSEQGINEATRAGEKVRENNIDIDVAFTSLLTRALDTTHYILTESKQQWIPVYKSWRLNERHYGGLQGLNKDDARKEFGEEQVHIWRRSYDVKPPAETEEQREAYLADRRYNHLDKRMMPYSESLKDTLVRVIPFWTDHISQYLLDGQTVLVSAHGNSIRALIKYLEDVSDEDIINYEIKTGAPLVYELTDDLEVIDKYYL

SEQ ID NO: 51618 - protein, 427 aa, Escherichia coli K12
MADTKAKLTLNGDTAVELDVLKGTLGQDVIDIRTLGSKGVFTFDPGFTSTASCESKITFIDGDEGILLHRGFPIDQLATDSNYLEVCYILLNGEKPTQEQYDEFKTTVTRHTMIHEQITRLFHAFRRDSHPMAVMCGITGALAAFYHDSLDVNNPRHREIAAFRLLSKMPTMAAMCYKYSIGQPFVYPRNDLSYAGNFLNMMFSTPCEPYEVNPILERAMDRILILHADHEQNASTSTVRTAGSSGANPFACIAAGIASLWGPAHGGANEAALKMLEEISSVKHIPEFVRRAKDKNDSFRLMGFGHRVYKNYDPRATVMRETCHEVLKELGTKDDLLEVAMELENIALNDPYFIEKKLYPNVDFYSGIILKAMGIPSSMFTVIFAMARTVGWIAHWSEMHSDGMKIARPRQLYTGYEKRDFKSDIKR

SEQ ID NO: 51619 - protein, 268 aa, Lycopersicon esculentum
MTLFSTSREVTKMAEDSYEDAIAGLKKLLSEKNELEDTAAAKIRQLTAELEGADGKKSDPDEKIRSGFAHFKAEKYEKNPELFGQLAKGQSPKFLVFACSDSRVCPSHILNFQPGEAFVVRNIANMVPPYDQTKYSGVGAAVEYAVVHLKVENILVIGHSCCGGIKGLMSIPDDGSTKSDFIEEWVKICSTAKAKVKAEFCDLDHSEQCTKLEKEAVNVSLGNLLTYPFVREAVVKKNIALKGGHYDFENGSFELWNIDFKLTPSVAL

SEQ ID NO: 51620 - protein, 582 aa, Magnetospirillum magnetotacticum MS-1
MCGLAALFSYRADAPPPDAAELARMTGAMTRRGPDGEGVWSGAEGRVRLGHRRLSIIELGEPGAQPMIADDGKTAIVFNGEIYNYRALRLRLEQQGVRLRSHSDTEVILEGYRLLGPDILAQLRGMFALAIWDGERGGILAARDGLGIKPLYVADDGRTVRLASQVKALLAGGGIETAPDPAGHAGFFLWGHVPEPHTLYRSIRALKPGTWERWGLDGRRDSGAFFDLGAELRRPRQAPRADLKSALEDSVAHHLVADVPVGVFLSAGRDSTTLAAMAAKLGTGKVKSVTLAFEEFAGTPKDEAPLAELAARHYATEHITRRIPGGDFAACRDQILADMDQPTIDGVNVWFVARAARESGLKVALSGLGGDELFAGYDNFTTIPRIVSVLGPSGAIPGLGRGFRALAGHFVRPKLAGLLELGTTLPDAYLLRRGLFMPWELPQVMDADMARIGLEALAPRLHLKRAAAGLGDDVAAISALEMQFYMRNQLLRDADWAGMAHSLEIRVPLVDTHLLDAVLDLRAAGRTPGKADMAACADPGLPTAILERPKTGFFVPVAQWLGESSLRGWAKRVHAALCEETL

SEQ ID NO: 51621 - protein, 191 aa, Arabidopsis thaliana
MGKKRKSTATSLDEVDRTVYASFRTAANSLSQLYTQSMNHQKLSFQAGERHGLEKLYQWIWRQQEGGSRVTPMDIVNYIQNELECCIDEPPISPRAPPPQSTMHVTNPGLMTTSGTSFPTAVPVVRSEQCENQAKNSVFSNALSSPIRRSLQNYQIPQGGYTSGGTTRSSEVNRGSNSPGSIDSSMDMHAE

SEQ ID NO: 51622 - protein, 588 aa, Escherichia coli K12
MKLPVREFDAVVIGAGGAGMRAALQISQSGQTCALLSKVFPTRSHTVSAQGGITVALGNTHEDNWEWHMYDTVKGSDYIGDQDAIEYMCKTGPEAILELEHMGLPFSRLDDGRIYQRPFGGQSKNFGGEQAARTAAAADRTGHALLHTLYQQNLKNHTTIFSEWYALDLVKNQDGAVVGCTALCIETGEVVYFKARATVLATGGAGRIYQSTTNAHINTGDGVGMAIRAGVPVQDMEMWQFHPTGIAGAGVLVTEGCRGEGGYLLNKHGERFMERYAPNAKDLAGRDVVARSIMIEIREGRGCDGPWGPHAKLKLDHLGKEVLESRLPGILELSRTFAHVDPVKEPIPVIPTCHYMMGGIPTKVTGQALTVNEKGEDVVVPGLFAVGEIACVSVHGANRLGGNSLLDLVVFGRAAGLHLQESIAEQGALRDASESDVEASLDRLNRWNNNRNGEDPVAIRKALQECMQHNFSVFREGDAMAKGLEQLKVIRERLKNARLDDTSSEFNTQRVECLELDNLMETAYATAVSANFRTESRGAHSRFDFPDRDDENWLCHSLYLPESESMTRRSVNMEPKLRPAFPPKIRTY

SEQ ID NO: 51623 - protein, 321 aa, Lycopersicon esculentum
MSTASINNCLTLSPAQASLKKPTRPVAFARLGNSSSSSSIPSLIRNEPVFAAPTPIINPIVREEMAKESYDQAIAALEKLLSEKAELGPVAAARVDQITAELKSADGGKAFDPVEHMKAGFIHFKTEKYDTNPALYGELAKGQSPKFMVFACSDSRVCPSHVLNFQPGEAFMVRNIANMVPAYDKVRYSGVGAAIEYAVLHLKVENIVVIGHSACGGIKGLMSLPEDGSESTAFIEDWVKICLPAKAKVLADHGGKEFAHQCTACEKEAVNVSLGNLLTYPFVREGLVKKTLALKGGYYDFVKGGFELWGLEFGLSPPLSV

SEQ ID NO: 51624 - protein, 244 aa, Arabidopsis thaliana
MSQETAIASFKKFQQSWIEQLRNHLNHLRSAQNHHRNSATGDEERLREAVDRVMEHFREYHRAKWAATDKDVIEVMASPWASALERSLQWVGGWRPTTLFHLVYTESSILFESRIVDILRGFRTGDLSDLSPSQFRVPFVKGRTVSELQCETVKEENAITEELSEWQDDASDLVMGTSSDPDQRIRRLAEIVHRTDDLRLRTITRVVEVLSPLQQAEFLVAAAELRTGVAGWGTSHDRRRSSEV

SEQ ID NO: 51625 - protein, 191 aa, Brassica napus
MYKSSSVRDEGTIPLLQKLSPHEKLHLNKNHSAPLTHFANEAISIAKISLPLVFTGLLLYFRSFVSLFFLGGLGRPTLAGGSLALAFANITGYSLFSGLTMGVESICSQAFGAKRYNLVTATIRRGIVLLLLTSLPVSLLWINIEKILQMLKQDEDLASEAHIFLLYSGPDLGAQSFLHPLRGYLRTQAKT

SEQ ID NO: 51626 - protein, 447 aa, Oryza sativa (japonica cultivar-group)
MAASSLDAEAAAAGQQDKAGSGSYTTAATAHQIDTDSWQQVGVLLVVGFNCAYVLSFSNLMMAPLGWGWGIACLLFIGAASWYANWLLAGLHVIDGQRFIRYRDLMGFVFGRKMYYITWFLQFITLILGNMGFILLGGRALKAIHAEFSSSHSPARLQWFIAATGFVYFAFAYFVPTISAMRNWLATSAALTVAYDVALIVILIKDGKSNKQKDYNVHGTQAEKVFGAFGAIAAILVCNTSGLLPEIQSTLRKPVVSNMRRALLLQYTAGAAVYYGISVAGYWAYGAAVSEYLPDQLSGPSWATVLINATAFLQSIVSQHLFTVPIHEALDTQMQRLDEGMFSRYNLGRRLLARGLVFGANAFVTALFPFMGDFVNLFGSFVLFPLTFMFPSMVVLKIKGKDEAGRWNRIWHWGIIVASSVLSVVTTAAAVRLIVHNASVYHFFADM

SEQ ID NO: 51627 - protein, 165 aa, Aegilops speltoides
VMASSATTVAPFQGLKSTAGLPVGRRSSGSLGSVSNGGRIRCMQVWPIEGIKKFETLSYLPPLSTEALLKQVDYLIRSKWVPCLEFSKVGFVFREHNSSPGYYDGRYWTMWKLPMFGCTDATQVLSEVEEVKKEYPDAYVRVIGFDNLRQVQCVSFIAFRPPGCE

SEQ ID NO: 51628 - protein, 1193 aa, Gloeobacter violaceus PCC 7421
MGSLRPPSRRNRGVALSKRGMTTLEEARAALETKNNYGASYTLEQLSEITGLSCPTITKVLDGEEGVDKRTLERFFKAFDLKLTKSDYEAAGNLSENPDGGIRATQQDWAEAVDVRNFHGRAEELAALTSWIVHDKCRLVALLGMGGIGKTSLSVKLAETVKENFDYVIWRSLRNAPPLQEILVDVFQFVGLTQSSVSYRVPNVKQSQLIDLFRRHRCLLVFDNVETVMDSARKAGYYREGYEDYGELFKSVGSSAHNSCLVLTSREKPKDLGPLEGKTLPVRSLRLTGLQENDGLELLKERGLDVATGDSKELLRYYGGNPLAIKMVASTIRTLFGNNISNFVTQGTSIFGDVRDLLSQHFNRLSELERQVMYWLSIHCEPIALTELHEVVLLPVTLPELLEAMESLSRRSLVEENKLYFSLQPVITEYTLDRLIYHAWMEIQTRKLSLLKQCFLLKAQGPDYIRSAQLRLIINPLVGRLRSFFKTLEAIEKHCEHIFSDLRREALGNQGYAAGNLLNILCAAKIDLRGWDLSGLAIWQADLRNVNLQQCNLFQCDLSQSMFTEPLGNISSVQFSPNRNVLATGDADGKVCLWQLPHGIQINICEGHTAWVWSVGFSPDGSIVASGSSDQTVRLWETTTGQCLRILQGHANSIWSVGFSPDGSIMASGSSDQTVRLWETTTGQCLRILQGHGGWVLSLAFSPDGSIVASGSSDQTVRLWETTTGQCLRILRGHTDWIHSVVFSPDGRSIASGGADRTVRLWEAATGECRKSFPGHSSLIWSVAFSPDGQSLASGGQDALIKLWDVATAQCRRILQGHTNLVYAVAFSPDGQTLASGSADQAVRLWKTDTGQCRKTIQGYTSGIYSVAFSPDGRTLASASTDHTVRLWDTATGECRQTLEGHHSWVFAVAFSPDGQTLASGSVDHTVLLWETVTGRCRKILEGHHSWVWSVVFSPDGTTIATGSADRTVRIWNAATGRLSTVLQAHTGWVSAVAFSADGRILASASADGTVRLWNVSNGLCVALLAEHSNWVHSVVFSPDGSLLASGSADGTVRLWDLQSNRCTRVIEGHTSPVWSVAFSADGTLLASAGEDRIIRIWRTSTGGIHRAFPGHSRPVWSVAFSPDGQTLASGSQDESIALWETHSAERSRVLRNPKPYEGMNLRAVSGLTEARKATLKALGAVVDISGQVRPET

SEQ ID NO: 51629 - protein, 884 aa, Arabidopsis thaliana
  misc_feature (598)..(598): Xaa can be any naturally occurring amino acid
  unsure (1)..(884): unsure at all Xaa locations
MPWWSKSKDEKKKTNKESIIDAFNRKLGFASEDRSSGRSRKSRRRRDEIVSERGAISRLPSRSPSPSTRVSRCQSFAERSPAVPLPRPIVRPHVTSTDSGMNGSQRPGLDANLKPSWLPLPKPHGATSIPDNTGAEPDFATASVSSGSSVGDIPSDSLLSPLASDCENGNRTPVNISSRDQSMHSNKNSAEMFKPVPNKNRILSASPRRRPLGTHVKNLQIPQRDLVLCSAPDSLLSSPSRSPMRSFIPDQVSNHGLLISKPYSDVSLLGSGQCSSPGSGYNSGNNSIGGDMATQLFWPQSRCSPECSPVPSPRMTSPGPSSRIQSGAVTPLHPRAGGSTTGSPTRRLDDNRQQSHRLPLPPLLISNTCPFSPTYSAATSPSVPRSPARAEATVSPGSRWKKGRLLGMGSFGHVYLGFNSESGEMCAMKEVTLCSDDPKSRESAQQLGQEISVLSRLRHQNIVQYYGSETVDDKLYIYLEYVSGGSIYKLLQEYGQFGENAIRNYTQQILSGLAYLHAKNTVHRDIKGANILVDPHGRVKVADFGMAKHITAQSGPLSFKGSPYWMAPEVIKNSNGSNLAVDIWSLGCTVLEMATTKXPPWSQYEGVPAMFKIGNSKELPDIPDHLSEEGKDFVRKCLQRNPANRPTAAQLLDHAFVRNVMPMERPIVSGEPAEAMNVASSTMRSLDIGHARSLPCLDSEDATNYQQKGLKHGSGFSISQSPRNMSCPISPVGSPIFHSHSPHISGRRSPSPISSPHALSGSSTPLTGCGGAIPFHHQRQTTVNFLHEGIGSSRSPGSGGNFYTNSFFQEPSRQQDRSRSSPRTPPHVFWDNNGSIQPGYNWNKDNQPVLSDHVSQQLLSEHLKLKSLDLRPGFSTPGSTNRGP

SEQ ID NO: 51630 - protein, 165 aa, Aegilops sharonensis
VMASSATTVAPFQGLKSTAGLPVSRRSSASLGSVSNGGRIRYMQVWPIEGIKKFETLSYLPPLSTEALLKQVDYLIRSKWVPCLEFSKVGFVFREHNSSPGYYDGRYWTMWKLPMFGCTDATQVLNEVEEVKKEYPDAYVRVIGFDNLRQVQCVSFIAFRPPGCE

SEQ ID NO: 51631 - protein, 255 aa, Pseudomonas syringae pv. tomato str. DC3000
MSRTQLFDLDGKVAFVSGASRGIGEAIARLLAQQGAQVIVSSRKLEGCQAVADAIIAEGGQATAIACHIGEMEQITRVFAQIRQQFGRLDILVNNAATNPQFCNVLDTDLSAFQKTIDVNIRGYFFMSVEAGKLMREGGGGSIINVASINAVSPGAYQGVYSMTKAAVVNMTKVFAKECAEFGIRCNALLPGLTDTKFASALVKNDAILNMALSQIPLKRVAAPSEMAGAVLYLASEASSYTTGVALNVDGGFLS

SEQ ID NO: 51632 - protein, 329 aa, Gloeobacter violaceus PCC 7421
MRAVAIKSFGGPENLAACQMPDPQPEVGEVTIDVEYAGVNYLELMFRRGFVAVPLPFVPGIEVAGHIRAVGEGVTDLQVGQPVAALTIVGQGGYAEVVRSPAALTFALDTLERPVDLAAAAAFPCTMITAYLVLSAAARFTPGDAVLVHAAAGGLGSALGQVARRLGAGQVLGTVGSPDKIAYAQAHGYDRVFLREHYREAVIAATGGAGVQIVVDPVGGNLRSESLEVLSVLGQLIVLGNAGNGEDTFQSTNGLWLSSKGVQGFNLLAVCLQAPEKIKDAARRVLEWIARDELHVPISGVLPLEAADEAHRRIEQRATTGKLILKIGR

SEQ ID NO: 51633 - protein, 164 aa, Aegilops bicornis
VMASSATSVAPFQGLKSTGGLPVSRRSRGSLGSVSNGGRIRCMQVWPIEGIKKFETLSYLPPLSTEALLKQVDYLIRSKWVPCLEFSKVGFVFREHNSSPGYYDSRYWTMWKLPMFGCTDATQVLNEVEEVKKEYPDAYVRVIGFDNLRQVQCVSFIAFRPPGC

SEQ ID NO: 51634 - protein, 442 aa, Lactobacillus johnsonii NCC 533
MKHTQVNHKKAALLGLQHLLAMYSGAIAVPLLIGTALKFNSTQMTYLVSIDIFMCGLATALQLLRNRYFGIGLPVVLGCAIQAVAPLQMIGKKFTIGTMYGAIIVAGVFVFLVAGYFSKIKKLFPPVVTGSLITVIGLSLIPVSIQNLGGGNSTAKNFGDPKNLLTGFITVAIILALQVWGKGFIKSIAVLVGLIAGTLIASTLGMVSLTPVAQASWFHLPQPFYFGMPQFEWSSSLTMIIIALVSMVESTGVFFAIGDLLHKDITSDDLKKGYRAEGLAQILGGIFNTFPYTTFSQNVGLLELSGITTKRPIYWASGFLMLMGLLPKFGALVTIIPDSVLGGAMLVMFTMIAVQGMRMLKRVDFEDTRNILIVAISIGLGLGVTVYPQVFQALPETIQLFLGNGIVVASLSATILNLLFKGKSGLEEQHIPAAPEKIEVQS

SEQ ID NO: 51635 - protein, 343 aa, Nocardia farcinica IFM 10152
MITTATEIVLPGRVEPDGLLVTRRELPAPGPGQALVRVEASGVSFAEQQMRRGKYYDQPPFPFVPGYDLVGIVTAVGQDVDAALVGRRVAALTKIGGWTSAALLDAADLVPVPEPLDAAAAETFVVNGITAWQMLFRTAKVRAGQTILVHGANGGVGSTLVQLARAHGIHVIGTASARHRRAVEELGATWIDYRTDVARQVRELAPGGVNAVFDHIGGPGIVESFRLLAPHGTLVSYGTAATKDQEGNSRLPVLTLLARLVLWNALPNKRNAHFFNLWAGKRNLSRFRARIAADLGAVFDLAAQGVLRAQVAARVPLSAAARAVELAESGSVVGKVVLVADEG

SEQ ID NO: 51636 - protein, 425 aa, Shewanella sp. MR-4
MPIENSTPFTVLLVDDDEDVLTAYRHLLQLSGYSAKGTHSPSKALALLNENWNGVVVSDIYMPAMNGMDLLNEVKKIDPEIPVIMITGHGDIPLAVEAVKRGAFDFLEKPLDSAQFLQLLKRAQQIRQGIIEQREAISSTFKEHLFGTSEQINQIRQQLSQIARIDKDVMIEGQIGTGRHLVASVLHSLSQHKNNSLIIHDCKEYPSLTELEASIAKVQNGTLVLRSLTQLSHEHQRWLCTRLLDQERLNTKSHRTICIFDTNPDDEVKSGALLPELYYYFSQARIQLPTLAERKSDIIPLFRNFLSQSCKRFDIPIPKIDLNYIEILKRHHWPGNIRELRNLAELYAVGIIKLPGEETLKLVQAPEAPLDELVDAYEKQVIENILYLCSGRVTDAANYLGIPRKKLYLRMKKLNLEKDKFKPKS

SEQ ID NO: 51637 - protein, 243 aa, Porphyra purpurea
MENQKEKILVVDDEASIRRILETRLTIIGYEVITASNGEEALIIFRKEYPSLVVLDVMMPKLDGYGVCQELRKESDVPIIMLTALGEVCDRITGLEIGADDYVVKPFSPKELEARIRSVLRRADKITTNLGVPNSGIISIGFLKIDTNKRQVYKNNERVRLTGMEFSLLELLVSKAGEPFSRASILQEVWGYTPERHVDTRVVDVHISRLRAKLEDDPSNPDLILTARGTGYLFQRIIEMNKL

SEQ ID NO: 51638 - protein, 274 aa, Vibrio vulnificus CMCP6
MERIAIIQMTSTSDCTDNVAYIEHWAEQAALLGASLVVTPENALLFGGREDYHQHAEPLGNGPLQQAMAQLAKRLAVTLVIGSMPIRQGHDVTTTSLVFGPNGERLGHYSKLHMFDVEVSDGHGHYRESDSFLAGDRSSVVATPIGRLGLSICYDVRFPALYQTLRQKGADILLVPAAFTAVTGEAHWEILLRARAIENQCWVIAAAQGGMHSASRETWGHSMVIDPWGKVVAQLPQQGDLLLAEIDLALSDTIRRKMPVVKHSRFTHLLDNKD

SEQ ID NO: 51639 - protein, 99 aa, Brassica napus
  misc_feature (47)..(47): Xaa can be any naturally occurring amino acid
  unsure (1)..(99): unsure at all Xaa locations
MVFFFNCGGLQKGRERKALAGGGAPEAKADKPQQHLQKNKFPNIFNXITSLLLWPEAFLLGFQHYLVMLGTTVLIPTALVLKIRGGFEKKAKMIQTFFF

SEQ ID NO: 51640 - protein, 449 aa, Streptococcus agalactiae 2603V/R
MTSGKTYVASVLEKVKKQNEHEEEFLQAVEEVFESLVPVFDKYPQYIEENLLERLVEPERVISFRVPWVDDKGQVQVNRGYRVQFSSAIGPYKGGLRFHPTVTQSIVKFLGFEQIFKNSLTGLPIGGGKGGSNFDPKGKSDNEVMRFTQSFMTELQKYIGPDLDVPAGDIGVGGREIGYLYGQYKRLNGYQNGVLTGKGLTYGGSLARTEATGYGAVYFAKEMLAARGQDLTGKVALVSGSGNVAIYATEKLQELGATVVAVSDSSGYVYDPDGIDLETLKQIKEVERARIVKYTEKHPKANFTPADQGSIWSIKADLAFPCATQNELDEEDAKLLVENGVLAVTEGANMPSTLGAIKVFQKAGVAFGPAKAANAGGVAVSALEMAQNSSRRAWTFEEVDQELQRIMKTIFVNASEAADEFGDSGNLVLGANIAGFLKVAQAMSAQGIV

SEQ ID NO: 51641 - protein, 151 aa, Brassica napus
MAILAPASFGRLTVPSRAQVRVRVSASANPRTSVDWVKETSSFFEQDKRPIMLFDGVCNLCNGGVKFVRDHDRNRSIRFEALQSEAGKKLLMRSGRAPDDISSVVLVEKDRSYVKSEAVLKIMKYIDLPFPQLAFFLQFSPLFVRDFLYEN

SEQ ID NO: 51642 - protein, 143 aa, Populus tremula
MISPSFISPLFTLAVVLTVTITPLISASGGFCQEKMATLGGVHDSQSSQNSAEIDGLARFAVDEHNKKENAILEFARVVKPKEQVFAGPMHHLTIEAIEAGKKKLYEAKVWVNPWLNFKELHEFKDAGDVPVFTSSDLGVKRG

SEQ ID NO: 51643 - protein, 498 aa, Geobacillus kaustophilus HTA426
MTMISAQTTEADLWIDGEWRPAASGERFDVIDPATGEVTARVANAGEDDVDAAVAIAEEAFSDRRWLAISPLERGRILRRIAELIRQHHCELAQLMTRENGMPINLALFIEIPLAADCFDFFASLVVKPQGEVLPFSVAGSAPDYMAWTMKEPIGVAGLITPWNFPLLMPTWKIAPALAAGCTMVVKPAPETPLTALKLAEICHEAGVPEGVINVLPGLDEAGKALVRHPRVPKIAFTGETETGRHILQAAAPHIKRVTLELGGKSPNIIFADADLEQAAKSALFGVFYNSGQVCQAGSRILVERTVYEPFVERLAERAKKLKVGPGTNPRSDLGPVISREQYEKVLRYIEIGKQEGARLAAGGRALDGGGGGYFIEPTVFADVSPSMRIACEEIFGPVAAVIPFADEEEAVRIANGTMYGLAAAVWTNDIKRALRLARRVKSGTVWLNTYQVLSPTAPFGGYKQSGLGRELGMQALDAYLETKTVICDLNDRPMTLF

SEQ ID NO: 51644 - protein, 451 aa, Treponema denticola ATCC 35405
MEDHKISMEKIVSLCKRRGFVFQSSEIYGGQNGAWDYGPLGIELKNNVSRAWWKEMTQLHDNIVGLDAAILMHPRTWEASGHVENFTDPLVDCKKCKSRFRADHLPPENLEKRVCPDCGGELTDTRKFNLMFKTHIGPTDDNSSVIYLRPETAQGIYVNYKNIIQSNRMKIPFGIAQIGKAFRNEIVTKNFIFRTCEFEQMEMQFFVKPGTDDEWFDYWKKQRWAFYEKYGVRTNKLQWHQHGKDELAHYAKDAYDIEYEFPMGFKELEGVHNRTNYDLTRHTEYSGKDMQYIDQDNGNEKYIPYIIETSAGLTRNVLMFICDAYDEEKVADKGNDDDWRTVLRFHPNIAPITVAVLPLMKKDGLAELAEEIRNELKEEFKTDYDQSGAIGKRYRRQDEVGTPFCVTVDYDSKEDNTVTLRFRDSMEQVRIPRTELISRIKTEIKNYKRAH

SEQ ID NO: 51645 - protein, 143 aa, Populus tremula
MISPSFISPLFTLAVVLTVTITPLISASGGFCQEKMATLGGVHDSQSSQNSAEIDGLARFAVDEHNKKENAILEFARLVKAKEQVVAGTMHHLTIEAIEAGKKKLYEAKVWVKPWLNFKELHEFKDAGDVPVFTSSDLGVKRG

SEQ ID NO: 51646 - protein, 452 aa, Staphylococcus aureus subsp. aureus MRSA252
MNYTQQLKQKDSEYVWHPFTQMGVYSKEEAIIIEKGKGSYLYDTNGNKYLDGYASLWVNVHGHNNKYLNKVIKKQLNKIAHSTLLGSSNIPSIELAEKLIEITPSNLRKVFYSDTGSASVEIAIKMAYQYWKNIDREKYAKKNKFITLNHGYHGDTIGAVSVGGIKTFHKIFKDLIFENIQVESPSFYRSNYDTENEMMTAILTNIEQILIERNDEIAGFILEPLIQGATGLFVHPKGFLKEVEKLCKKYDVLLICDEVAVGFGRTGKMFACNHEDVQPDIMCLGKAITGGYLPLAATLTSQKIYNAFLSDSHGVNTFFHGHTYTGNQIVCTVALENIRLYEKCKLLSQIETTSSTLEKQLHALKRHRNVGDVRGRGLMFGVELVTDKDSKTPLEIEKVERIVRNCKENGLMIRNLENVITFVPVLSMSNKEVKTMVRIFKKAVHNILDRKC

SEQ ID NO: 51647 - protein, 194 aa, Thiobacillus denitrificans ATCC 25259
MAAPFADGANSTSRESIMAHEIATLAGGCFWCIETVFNRLQGVESAVSGYMGGHTETPSYEAVCNGDTGHAEVVQITFDPDVISYRDLLDVFFTIHDPTQLNRQGNDVGTQYRSAIFWHTPAQKAEAEAAIAALDASKQYGSPVVTEVAEATTFYPAETYHQRYYEANPRQPYCQYVVAPKVAKAEQKFADRLK

SEQ ID NO: 51648 - protein, 551 aa, Bacillus thuringiensis serovar konkukian str. 97-27
MMRYILTAVTVSVIFLIAACSVTTNTTNDHKNRNDKKTKQTETATKPLGIVKGPEVALIAKEEKQKLSNGVIVPVWTFNGSSPGPEIRVKKGEKVKVTLKNELSAPVSIHWHGYPVPNDMDGIPGVTQDAVESGKSFTYEFEANVPGTYWYHSHQDSVNQLDRGLYGAFVVEDTNEKYDKDYTLMLDEWVTDKEEINKQVKEMTIGKKEKADSKKSSMDNDNTKKNGDMKSMDHSGMDMDSDKKDPGNMAGMDHGNMKMEGHDMSMYDLFTINGKSGDLVVPLKVNKGDKVRLRLVNAGYLSHNIHVHGHDIKVIVTDGQPINAPKVIKAKVISIAQGERYDIEFTANNPGKWYVEDHSENKGAKGMKAIIEYDGSKEMKDIADEKEKLPKLDMTKYGAKKLGGFTLNQQYTATYNMDLNTQMNGNEMVYTINGKVFPDIDPIQVKKDDLVKVKLVNRSKMDDHPMHLHGHFFQVLSKDGKPVEGSPIVKDTLNLKPGEEYEVAFVADNPGEWMFHCHDLHHASAGMVTEVKYKDYKSDYVPNPNIPNKPE

SEQ ID NO: 51649 - protein, 143 aa, Populus tremula
MISPSFISPLFTLAVVLTVTITPLISASGGFCQEKMATLGGVHDSQSSQNSAEIDGLARFAVDEHNKKENAILEFARVVKAKEQVVAGTMHHLTIEAIEAGKKKLYEAKVWVKPWLNFKELHEFKDASDAPVFTSSDLGVKRG

SEQ ID NO: 51650 - protein, 160 aa, Brassica napus
  misc_feature (149)..(149): Xaa can be any naturally occurring amino acid
  unsure (1)..(160): unsure at all Xaa locations
MYSAIRSSLPLDGSMGEYSDGTNLPVDACLVLTTDPKPRLRWTSELHERFVDAVTQLGGPDKATPKTIMRTMGVKGLTLYHLKSHLQKFRQGRQLCKESTENSKDVSCAAESQDTGSSSTSSLRLAAQEQNESYQVTEALRAQMEVQRXLHEQLEVQRRL

SEQ ID NO: 51651 - protein, 218 aa, Streptococcus pyogenes M1 GAS
MLMIKGIIFDMDGVLFDTEPFYLRRREDFFKTKGIPIDHLNSKDFIGGNLQELWKELLGKNRDDAIVKAITTDYDAYKQAHKPPYQKLLITEVNSCLEQLEKQGIKLAVASNSKRQDVLLALETTQIKDYFEIILAREDVSRGKPYPDIYNKAVQKLGLQKKQLLVVEDSQKGIAAAKAANLTVFAITDYRYGIDQSQADHKIDHLGQLCVKIGCFGS

SEQ ID NO: 51652 - protein, 265 aa, Nicotiana tabacum
AHGGVYAHPGVPIGSHPPGHGMATSPAVSQAMDGASLSLDASAKSSENSDRGLLAMSLGNGSADNIEGGADHGNSQSGDTEDSTDGSDTNGAGVSERSKKRSRETTPDNSGDSKSHLRRCQPTGEINDDSEKAIVAVRPGKVGEKVMGTVLSPSMTTTLEMRNPASTHLKASPTNVSQLSPALPNEAWLQNERELKREKRKQSNRESARRSRLRKQAEAEELAIRVQSLTAENMTLKSEINKLMENSEKLKLENAALMERLKMNS

SEQ ID NO: 51653 - protein, 471 aa, Pichia angusta
MSLDTEVDKIVSEFAVTQETLQKGVERFIELATAGLNSDEDKYGLPMIPTFVTSIPTGKEKGILFAADLGGTNFRVCSVALNGDHTFKLIQQKSHIPAELMTSTSDELFSYLASKVKNFLETHHEGAVTSTGSQKFKMGFTFSFPVSQTALNAGTLLRWTKGFNIPDTVGQEVVSLFQMHLDAQEIPVTVSALSNDTVGTLLARSYTGSNKEGTTVLGCIFGTGTNGAYNEKLENIKKLPAEVREKLKAQGVTHMVINTEWGSFDNQLKVLPNTKYDAQVDELTGNKGFHMFEKRVSGMFLGEILRHILVDLHSKGVLFTQYASYESLPHRLRTPWDLDSEVLSLIEIDESTNLQATELSLKQALRLPTTTEERLAIQKLTRAVAKRSAYLAAIPIAAILHMTESFKGHNVEVDVGADGSVVEFYPGFRTMMRDAIAQTQIGAKGERRLHINIAKDGSSVGAALCALSEKD

SEQ ID NO: 51654 - protein, 409 aa, ASPERGILLUS NIDULANS FGSC A4
MFNKLSGQPESYEKKSLYRFGRTLGAGTYGIVREADCSSGKVAVKIILKRNVRGNERMVYDELDLLQKLNHPHIVHFVDWFESKDKFYIVTQLATGGELFDRICEYGKFTEKDASQTIRQVLDAVNYLHQRNIVHRDLKPENLLYLTRDLDSQLVLADFGIAKMLDNPAEVLTSMAGSFGYAAPEVMLKQGHGKAVDIWSLGVITYTLLCGYSPFRSENLTDLIEECRSGRVVFHERYWKDVSKDAKDFILSLLQVDPAQRPTSEEALKHPWLKGESASDRDLLPEIRAYIARSRLKRGIEIIKLANRIEALKMQEEDEEDIPSAVDVQASEASDKSGLSPFPALSTENSNTHPASTGNGESGGTKKRSLSKIARGAIFREVVLAKVREMKENEEREKVEREARERAHS

SEQ ID NO: 51655 - protein, 165 aa, Aegilops tauschii
VMASSATTVAPFQGLKSTAGLPVSRRSSGSLGSVSNGGRIRCMQVWPIEGIKKFETLSYLPPLSTEALLKQVDYLIRSKWVPCLEFSKVGIVFREHNSSPGYYDGRYWTMWKLPMFGCTDATQVLNEVEEVKKEYPDAYVRVIGFDNLRQVQCVSFIAFRPPGCE

SEQ ID NO: 51656 - protein, 416 aa, Nostoc sp. PCC 7120
MPATSFYADAAYNTQKSRQALDPDIAIDDSDLSVDEIQELEIAAADPATFGASANRRSTDLVRLYLQEIGRVRLLGRDEEVSEAQKVQRYLKLRIVLANAVKQGDEVATPYLHLIEVQERLASELGHRPSLERWAATAGINLCDLKPILSEGKRRWAEIAKMTVEELEKMQSQGLQSKEHMIKANLRLVVSVAKKYQNRGLELLDLVQEGTLGLERAVEKFDPTKGYRFSTYAYWWIRQGITRAIATSSRTIRLPVHITEKLNKIKKAQRKIAQEKGRTPTLEDLAIELDMTPTQVREVLLRVPRSVSLETKVGKDKDTELGELLETDGVTPEEMLMRESLQRDLQHLLADLTSRERDVILMRFGLADGHPYSLAEIGRALDLSRERVRQIESKALQKLRQPKRRNLIRDYLESLS

SEQ ID NO: 51657 - protein, 165 aa, Triticum urartu
VMASSATTVAPFQGLKSTAGLPVSRRSSGSLGSVSNGGRIRCMQVWPIEGIKKFETLSYLPPLSTEALLKQVDYLIRSKWVPCLEFSKVGFVFREHYSSPGYYDGRYWTMWKLPMFGCTDATQVLNEVEEVKKEYPDAYVRVIGFDNLRQVQCVSFIAFRPPGCE

SEQ ID NO: 51658 - protein, 449 aa, Staphylococcus aureus
MMTKKYDLIVIGTGSAGSITAAKCNKAGWNVAMVDDRPFGGTCALRGCDPKKVLHGAAELIDWNKRMVKNGVPSEVSINWKDLMNFKRTFTDDVPEKKEEALNKQGIDTYHGNASFVSEDKLEVNKEVLEGSHFLIASGAKPTPLPIKGEEHLTYSDEFLELDELPQRIVFVGGGYISFEFAHIAARAGSEVHIIHRGQRPLENFDIDLVDILLEKSKEIGIQVHLQHSVESIEKEQGKFHVYARKKEDITRFEADIVIHGAGRVPALDMNLEKGNIERKKHGVHVNEYLQSVSNPNVYAAGDAAATDGLPLTPVASADSHVVASNLLKGNSKKIEYPVIPSAVFTVPKMASVGMSEEEAKNSGRNIKVKQKNISDWFTYKRTNEDFAAFKVLIDEDSDQVVGAHLISNEADELINHFATAIRFGISTKELKQMIFAYPTAASDIAHML

SEQ ID NO: 51659 - protein, 329 aa, Frankia sp. CcI3
MSSTPVNVTVTGAAGQIGYALLFRIASGQLLGADTPVKLRLLEIPQAVRAAEGTALELEDSAFPLLAGVDVFDDAKRAFEGTNVALLVGARPRTKGMERGDLLSANGGIFKPQGEAINSGAAEDIRVLVVGNPANTNALIAQTHAPDVPAERFTAMTRLDHNRAIAQLAKKLGVPSAEIKKITIWGNHSATQYPDIFHAEVGGRSGAEAVGDQAWIADEFIPRVAKRGAEIIEVRGASSAASAASAAIDHIFTWVNGTPAGDWTSAAIPSDGSYGVPEGLISSFPVTASGGRFEIVQGLELDAFSREKIDASVRELAEEREAVRALGLI

SEQ ID NO: 51660 - protein, 488 aa, Saccharomyces cerevisiae
DVREDRVVTNSTGNPINEPFVTQRIGEHGPLLLQDYNLIDSLAHFNRENIPQRNPHAHGSGAFGYFEVTDDITDICGSAMFSKIGKRTKCLTRFSTVGGDKGSADTVRDPRGFATKFYTEEGNLDWVYNNTPVFFIRDPSKFPHFIHTQKRNPQTNLRDADMFWDFLTTPENQVAIHQVMILFSDRGTPANYRSMHGYSGHTYKWSNKNGDWHYVQVHIKTDQGIKNLTIEEATKIAGSNPDYCQQDLFEAIQNGNYPSWTVYIQTMTERDAKKLPFSVFDLTKVWPQGQFPLRRVGKIVLNENPLNFFAQVEQAAFAPSTTVPYQEASADPVLQARLFSYADAHRYRLGPNFHQIPVNCPYASKFFNPAIRDGPMNVNGNFGSEPTYLANDKSYTYIQQDRPIQQHQEVWNGPAIPYHWATSPGDVDFVQARNLYRVLGKQPGQQKNLAYNIGIHVEGACPQIQQRVYDMFARVDKGLSEAIKKVAE

SEQ ID NO: 51661 - protein, 396 aa, Escherichia coli
MFENITAAPADPILGLADLFRADERPGKINLGIGVYKDETGKTPVLTSVKKAEQYLLENETTKNYLGIDGIPEFGRCTQELLFGKGSALINDKRARTAQTPGGTGALRVAADFLAKNTSVKRVWVSNPSWPNHKSVFNSAGLEVREYAYYDAENHTLDFDALINSLNEAQAGDVVLFHGSCHNPTGIDPTLEQWQTLAQLSVEKGWLPLFDFAYQGFARGLEEDAEGLRAFAAMHKELIVASSYSKNFGLYNERVGACTLVAADSETVDRAFSQMKAAIRANYSNPPAHGASVVATILSNDALRAIWEQELTDMRQRIQRMRQLFVNTLQEKGANRDFSFIIKQNGMFSFSGLTKEQVLRLREEFGVYAVASGRVNVAGMTPDNMAPLCEAIVAVL

SEQ ID NO: 51662 - protein, 165 aa, Triticum timopheevii subsp. armeniacum
VMASSATTVAPFQGLKSTAGLPVSRRSSGSLGSVSNGGRIRCMQVWPIEGIKKFETLSYLPPLSTEALLKQVDYLIRSKWVPCLEFSKVGFVFREHNSSPGYYDGRYWTMWKLPMFGCTDATQVLNEVEEVKKEYPDAYVRVIGFDNLRQVQCVSFIAFRPPGCE

SEQ ID NO: 51663 - protein, 165 aa, Triticum turgidum subsp. dicoccoides
VMASSATTVAPFQGLKSTAGLPVGRRSSGSLSSVSNGGRIRCMQVWPIEGIKKFETLSYLPPLSTEALLKQVDYLIRSKWVPCLEFSKVGFVFREHNSSPGYYDGRYWTMWKLPMFGCTDATQVLNEVEEVKKEYPDAYVRVIGFDNLRQVQCVSFIAYRPPGCE

SEQ ID NO: 51664 - protein, 279 aa, Agrobacterium tumefaciens str. C58
MTVRMDKRFADLRAENRPALITYFMGGDPDFQTSLGIMKALPEAGADVIELGMPFSDPMADGPAIQLAGQRALKGGQTLKTTLDLAREFRKQDNATPIVMMGYYNPIYIYGVEKFLDDAIASGIDGLIVVDLPPEMDDELCIPALARGINFIRLATPTTDGKRLPAVLKNTSGFVYYVSMNGITGSALPDPSLISGAVGRIKAHTELPVCVGFGVKTADHAKAIGAVADGVVVGSAIVNQIAGSLTKDGQATADTVPAVTTLVKGLSTGVRASRLAAAE

SEQ ID NO: 51665 - protein, 165 aa, Triticum aestivum
VMASSATTVAPFQGLKSTAGLPVGRRSSGSLSSVSNGGRIRCMQVWPIEGIKKFETLSYLPPLSTEALLKQVDYLIRSKWVPCLEFSKVGFVFREHNSSPGYYDGRYWTMWKLPMFGCTDATQVLIEVEEVKKEYPDAYVRVIGFDNLRQVQCVSFIAFRPPGCE

SEQ ID NO: 51666 - protein, 279 aa, Brucella melitensis
MTTRIDTKFAELKAEGRPALVTYFMGGDPDLETALKVMKALPKAGADVIELGMPFSDPMADGPAIQAAGLRALNAGQTLAKTLYMAAEFRKEDDTTPIVMMGYYNLIYIYGVERFLTDAKASGVDGLIVVDLPSEMDAELCIPAMKAGINFIRLTTPTTDDKRLPKVLHNSSGFVYYVSMNGITGAAIADTAKVGEAVRHIKKSTDLPICVGFGVKTPEQAAAIATHADGVVVGTAIVNAIAGELDEKGKAKGDPVAAATRLVHALAESVRATRLEAAQ

SEQ ID NO: 51667 - protein, 208 aa, Shewanella sp. MR-4
MKLYELAPTPSARRVSIFLAEKGIDIPRVSVDIRGGENLNPEFKAKSVNGRIPLLELDDGNHICESVAICRYLDEIYPSDTSLFGNTPLERAKVEMWQRIIELQGFTAGFQAFRNLTGIYKDRENCVEAWGAESRQRVIDFLPTLDQQLAKSSYVAGDNFTIADISAYVFISFIKNLDILVDDTLPHIQAWFATVAQRPAIVSLTPKN

SEQ ID NO: 51668 - protein, 429 aa, Synechocystis sp.
MKRVLAIILGGGAGTRLYPLTKLRAKPAVPLAGKYRLIDIPVSNCINSEIVKIYVLTQFNSASLNRHISRAYNFSGFQEGFVEVLAAQQTKDNPDWFQGTADAVRQYLWLFREWDVDEYLILSGDHLYRMDYAQFVKRHRETNADITLSVVPVDDRKAPELGLMKIDAQGRITDFSEKPQGEALRGMQVDTSVLGLSAEKAKLNPYIASMGIYVFKKEVLHNLLEKYEGATDFGKEIIPDSASDHNLQAYLFDDYWEDIGTIEAFYEANLALTKQPSPDFSFYNEKAPIYTRGRYLPPTKMLNSTVTESMIGEGCMIKQCRIHHSVLGIRSRIESDCTIEDTLVMGNDFYESSSERDTLKARGEIAAGIGSGTTIRRAIIDKNARIGKNVMIVNKENVQEANREELGFYIRNGIVVVIKNVTIADGTVI

SEQ ID NO: 51669 - protein, 344 aa, Prochlorococcus marinus str. MIT 9313
MGIPLESAKGASLTPSSEVVLPSTSKQRSETANRAGRNGQASRNQNRQGGRLGTDAIGFYLSSIGRVPLLTAAEEIELAHHVQAMKELLELPEQDQTPRQRHKIRMGKRARDRMMSANLRLVVSVAKKYQNQGLELLDLVQEGAIGLERAVDKFDPAMGYKFSTYAYWWIRQGMTRAIDNSARTIRLPIHISEKLSKMRRISRELSHRFGRQPNRLELAHAMGIQPQDLEDLIAQSAPCASLDAHARGEEDRSTLGELIPDPDGAEPMEGLDRSIQKEHLGGWLSQLNEREQKILRLRFGLDGEEPLTLAEIGRQISVSRERVRQLEAKAILKLRMMTNHQQAA

SEQ ID NO: 51670 - protein, 564 aa, Yarrowia lipolytica CLIB122
MCGIFAAYKLPDVAEYKTHALQLSKRIRHRGPDWSGNCSKNNTIICHERLAIVGLDTGAQPITSPDESIVLGVNGEIYNHRILRKEFPDYKFKTHSDCEPIIPLYEKYGIDAPKKLDGMFAFVLYDSNKDRIIAARDPIGITTLYMGRSYKNPQTVWFASELKCLVDDCDEIKAFPPGHVYDSDTDKITRYFEPSWWDGSKIPTKRVDYKELREALEAAVRKRLMSEVPYGVLLSGGLDSSLIASIAARETRRAAPEKTVNQDLAGVDEQGHLTNSSGSRLHSFSVGLPGAPDLLAAQKCAEFIGTIHHEYTFTVQEGLDALRDVIYHLETFDVTTIRASTPMYLLSRKIKAGGVKMVLSGEGSDEVFGGYLYFGAAPSPEAFHTECVQRVKNLHYADCLRANKSTMAWGLEARVPFLDKQFLEVAMNIDPKDKIIDKDHIEKYSIRKAFDTSDEPGAEPYLPDEILWRQKEQFSDGVGYSWIDGLKDAAENTITDEQLKNPKPHWGADVPKTKEAYWYRCMFDELFPQPAAATTVMRWIPKADWGCAEDPSGRYVKSHSAHKQ

SEQ ID NO: 51671 - protein, 380 aa, Geobacillus kaustophilus HTA426
MREVVIVDAVRTAIGKKKGALSSVHPVDLLVPVLRALVDRNGLDAGLVEDVIVGCVTMTGEQGGNIARQAVLAAGFPVGVPAFSLNRMCGSSQQAIHNAAQAILAGDIDIAIAAGVESMTRVPMGSDMGRFSRQLTSRYNIVPQGISAEMIAKKWGLSREELDAFSLQSHEKAAAATDRGMFEREIIPLDVPGEEGTVSFTRDEGIRRDTSLEKLAALTPSFQPKGGVITAGNSSQVSDGAAGVLLMSAEKARQLGLRPRARIVARAVVGEDPILMLTGVIPATRRVLEKTGLRLEQIDVIEINEAFASVVKAWERELEPDMAKVNPRGGAIALGHPLGASGARLMTTLLHELEDMDGKYGLQVMCIGFGMATATIIERL

SEQ ID NO: 51672 - protein, 126 aa, Methanosarcina barkeri str. fusaro
MADMKWAVAHIKSSFNNTIITVTDITGAETIAKSSGGMVVKAARDESSPYTAMQMAGQLADQLRDKGIHGIHIRVRAPGGNKQRSPGPGAQAAIRAFARAGIRIGRIEDVTPVPHDGTRPKGGRRV

SEQ ID NO: 51673 - protein, 505 aa, Helicobacter pylori
MVNKDVKQTTAFGAPVWDDNNVITAGPRGPVLLQSTWFLEKLAAFDRERIPERVVHAKGSGAYGTFTVTKDITKYTKAKIFFKVGKKTECFFRFFTVAGERGSADAVRDPRGFAMKYYTEEGNWDLVGNNTPVFFIRDAIKFPDFIHTQKRDPQTNLPNHDMVWDFWSNVPESLYQVTWVMSDRGIPKSFRHMDGFGSHTFSLINAKGERFWVKFHFHTMQGVKHLTNEEAAEVRKYDPDSNQRDLFNAIARGDFPKWKLSIQVMPEEDAKKYRFHPFDVTKIWYLQDYPLMEVGIVELNKNPENYFAEVEQVAFTPANVVPGIGYSPDRMLQGRLFSYGDTHRYRLGVNYPQIPVNKPRCPFHSSSRDGYMQNGYYGSLQNYTPSSLPGYKEDKSARDPKFNLAHIEKEFEVWNWDYRADDSDYYTQPGDYYRSLPADEKERLHDTIGESLAHVTHKEIVDKQLEHFKKADPKYAEGVKKALEKHQKMMKDMHGKDMHHTKKKK

SEQ ID NO: 51674 - protein, 343 aa, Bacillus cereus ATCC 10987
MKKIGVGIVGFGFSSTTFHIPLLQTIEEYDIRAILSSKEEVVKETLPSANVVSTIDELVKRADIDLVVITSPNTTHFPYVKEAILNGKHVVVEKPFVVSIEEGEELISLAKKHNVVLSVYHNRRFDNDFLTIKKLLEEDRIGNLYAYEAHFDRFRPHVRDRWREKNLPGSGILYDLGSHLIDQALSLFGKPNAISADVIKQRPGAEVDDYFHIVLHYGVKRVILRSSSYVKKAGPHFTMHGDKGSIVKYGMDSQEEQLKNGMKPGDSGYGVDAEENFVTLQTEEELVRIPTEVGCYDMYYKGVRDSIINGEKPPVTAQEGLEVIRLIQLAVESNETGRVITVK

SEQ ID NO: 51675 - protein, 143 aa, Populus tremula
MISPSFISPLFTLAVVLTVTITPLISASGGFCQEKMTTLGGVHDSQSSQNSAEIDGLARFAVDEHNKKENAILEFARVVKPKDQVFAGPMHHLTIEAIEAGKKKLNEAKVWVNPWLNFKELHEFKDAGDVPVFTSSDLGVKRG

SEQ ID NO: 51676 - protein, 414 aa, Thiobacillus denitrificans ATCC 25259
MTADKKPRLRTIQKSTKLDNVCYDIRGPVMARARQMEEEGQRIIKLNIGNPAPFGFEAPEEIVQDVILNLPNASGYSDSKGLFAARKAIMHETQRKGIAGVTIDDIIVGNGVSELIVMAMQALLNNGDEVLVPAPDYPLWTAAVSLGGGKPRHYLCDEGAGWLPDLDDIRAKITPSTRAIVIINPNNPTGALYPTELLREILEIARQHQLIVYADEIYDKVLFDGVVHTSIASLADDLLIVTFNGLSKNYRACGYRSGWLVVSGDKRHAKDYLEGLNMLASMRLCSNVPGQHAIQTALGGYQSINDLVAPSGRLTRQRDLAHELLTLIPGVSCVKPKAAMYLFPRLDPKLYPIHDDQKFILNLLEEERVLVVQGTGFNWPRPDHLRVVFLPHEEDLTEAIGRMSRFLDRQRAHR

SEQ ID NO: 51677 - protein, 413 aa, Bacillus cereus ATCC 10987
MGYYDGPNLNEEHSETREVRKSGSKKGYFFTGLVGAVVGAVSISFAAPYMPWAQNNGAAVSSFSSDSKVEGTVVPVVNKAKNETDLPGMIEGAKDVVVGVINMQQSIDPFAMQPTGQEQQAGSGSGVIYKKAGNKAYIVTNNHVVDGANKLAVKLSDGKKVDAKLVGKDPWLDLAVVEIDGSNVNKVATLGDSSKIRAGEKAIAIGNPLGFDGSVTEGIISSKEREIPVDIDGDKRPDWQAQVIQTDAAINPGNSGGALFNQNGEIIGINSSKIAQQEVEGIGFAIPINIAKPVIESLEKDGVVKRPALGVGVVSLEDVQAYAVNQLKVPKDVTNGVVLGKIYPISPAEKAGLEQYDIVVALDNQKVENALQFRKYLYEKKKVGEKVEVTFYRNGQKMTKTATLADNSATKNQ

SEQ ID NO: 51678 - protein, 154 aa, Brassica napus
  misc_feature (147)..(147): Xaa can be any naturally occurring amino acid
  unsure (1)..(154): unsure at all Xaa locations
MAASNGEKSLIVSFGEMLIDFVPTVSGVSLAEAPGFIKAPGGAPANVAIAVSRLGGRAAFVGKLGDDEFGHMLAGILKQNGVSAEGINFDTGARTALAFVTLRSDGEREFMFYRNPSADMLLRPDELNLDLIKSAKVFHYGSISLIXEPCRSAH

SEQ ID NO: 51679 - protein, 469 aa, Staphylococcus aureus subsp. aureus MRSA252
MARKLHRELNNRHIQLIAIGGAIGTGLFLGSGQTISLTGPSLLFTYMIIGVVLFAFMRALGELLLSNTRFNSFVDIANEYLGPFGGFVIGWTYWLCWIVSSMSDLTAMGQYFAFWYPQVPNWITVLFIVLILISFNLLGARLFGELEFWFSIIKVVTIIAMVIVGLVLIFFSFKTHYGHASFTNLISHGGMFPGGTFGFLMSFQIAVYSFIGIELIGVTAGETKDPEKTLPKAINNVPIRILLFYIGGLLVIMSVIPWNDIDPNSSPFVKLFTLIGVPFAAGVVNFVVLTAAASATNSGIYSNSRILFGLSQQGLGPKVLNKTNSHGVPYLSMLVSSIALLIAALLNYIFPNAIQLFIYVTTLSTVLFLVVWAMIIVAYLMYLKKHPEAHKNSKFKLIGGKPIAYIILAFFFFVFILLFFSDETRAAIYISPFWFIFLFFFYKKYKTNAEKLAYEQRQNDSGHFRYDNQ

SEQ ID NO: 51680 - protein, 143 aa, Populus tremula
MISPSFISPLFTLAVVLTVTITPLISASGGFCQEKMATLGGVHDSQSSQNSAEIDGLARFAVDEHNKKENAILEFARVVKAKEQVVAGTMHHLTIEAIEAGKKKLYEAKVWAKPWLNFKELHEFKDASDVPVFTSSDLGVKRG

SEQ ID NO: 51681 - protein, 424 aa, Gossypium hirsutum
AITAGGSVSSVSTTESKEKMATEMALVKPISKFSTSSPIFSNSRYGKFTTVRMSSTSQSTTKAAAKGGKKAAKTAIKETLLTPRFYTTDFDEMEALFNTEINKNLNQSEFESLLQEFKTDYNQTHFVRNKEFKEAADKIDGPLRQIFVEFSERSCTAEFSGFLLYKELGRRLKKTNPVVAEIFSLMSRDEARHAGFLNKGLSDFNLALDLGFLTKARKYTFFKPKFIFYATYLSEKIGYWRYITIYRHLKENPEYQCYPIFKYFENWCQDENRHGDFFSALLKAQPQFLNDWKAKLWSRFFCLSVYVTMYLNDCQRTAFYEGIGLDTKEFDMHVIIETNRTTARIFPAVLDVENPEFKRRLDKMVEINEQLLAVGETSDIPLVKNLKRIPLIAALASELLATYLMPPIESGSVDFAEFEPQLVY

SEQ ID NO: 51682 - protein, 206 aa, Zea mays
MPHLAATPPTSSAAAVPAAGRIAFRRPWNTPQPEALRLRLRLRARGVRREDGGGVRTEEQEQTAPRTFYDLLGISADGSPDDVRASYRRLALKYHPDVSPPGAAAENTRRFIEVQEAYETLSDPSRRSSYDRALARGVCRLAFSGRRSQSHHAYYHHQEQGERSGWRRSWEDQIAELKRRSVAKDSEENLSWGARMRRRAEASAAE

SEQ ID NO: 51683 - protein, 210 aa, Brassica napus
  misc_feature (198)..(198): Xaa can be any naturally occurring amino acid
  unsure (1)..(210): unsure at all Xaa locations
STHASALSSLSRVCHCDGLLLCTTEAYSWLAVWNPFTSQTRWICVEPISIRHRKIWYSHALGYEKGKSCRVYKILRFAGNVHEVYTLKSSDSWRALDVSPDWDIGYDNHGVSFQGNTYWYAKVAGGVGFLLCFDFTGERFGQLLPLAFECFSEDSVILSSVGGEQQQLAGLFQHRETVEMEVWVTTKVEPDAVSWSNXLAVDMGPLTGFR

SEQ ID NO: 51684 - protein, 712 aa, Oryza sativa
MNATMQKQARVQGCPARTAKLAALRPQPVRAPRRAVAPQAAAVEAPAKVSQETIDKCVNAIRFLAIDAVNKAKSGHPGLPMGAAPMSYVLFNETMKFNPKNPAWANRDRFVLSAGHGSMLQYALMHLVGYESVQLDDIKQFRQWDSKTPGHPENFLTTGVEVTTGPLGQGICNAVGLAVAEAHLAARFNKPDAKVIDHYTYCIMGDGCMMEGISNEACSLAGHWGLGKLIALYDDNNISIDGHTEISFTEDVAARFEALGWHVQHVKDGNTDFDALRKAIANAKAVTDKPSLLKVSTLIGYGSPNKADTHDVHGAPLGPEETAATRDNLKWPYAEFEVPQEVYDVMRGAVSRGAAAEEEWNAAMAAYKSKYPKEAEELEGLLSGKLPAGWEKALPSYTPEDKGLATRQYSQIMLNALAPVLPGLIGGSADLAPSNLTLMKMFGDFQKDSNAERNLRFGVREHGMGAICNGIGLHNSGLIPYCATFYIFTDYMRAAMRMSALSEMGVIYVMTHDSIGLGEDGPTHQPIEHLASFRAMPNMLMIRPCGGNETAGAYKVAVSNRKRPSTIALSRQGMANLPGCSVEGVEKGAYVIHGGDAKPDVIFIGTGSELPLAVEAAKKLEAEGKKVRVVSMPCWELFAEQSAEYKESVLPKDVTARVAVEAGSSFGWERYTTSNGKFVGIDDFGASAPAGILYEKFGITLDNVVAAAKSLL

SEQ ID NO: 51685 - protein, 498 aa, Rubrobacter xylanophilus DSM 9941
MSPLVGLDIGTGGARAVAVEESGGILAEATSSYPLTSPRPGWTEQDPEEWWRAAREVLGRVAAEVGGEVRGIGLTGQMHGSVFLDAGERPIRPALLWNDQRTARQCAEISGLVGAERLIAIAGNPALTGFQAPKILWLREEEPQNYRRVASVLLPKDYIRLRLTGERATDASDAAGTLLLDVGRREWSEEILSRLEIPRGWLPRVYEGPEATGALRGGVASELGLPAGIPVAAGGGDNAAAAVGVGVVREGILSSSVGTSGVLFAHTDAFSPDPSGRVHAFCHALPGAYHLMGVTLSAGGSLAWWRSTLEKDYEVLVEEAAQVPPGAEGLLFLPYLTGERTPHLDPAARGAFIGLTARHTAAHMSRAVMEGVVFSLRESLEILRSLGVPVEEVRATGGGARSPLWRQLQADIYNTPIRRTTADEGPAYGAALLGGVAAGAYRDVQEAVASCVRLREELTEPDERRSKAYEEHYAVYRSLYAANREAMHRLSELAGSAS

SEQ ID NO: 51686 - protein, 568 aa, Triticum turgidum
MASWFETYHHPSKPPRERETAAFFGCRLGIRENNCELTCASCRSFLPPVKILIRSIRLGCCCSWVRGSCACCCSWIRGLCGRKKREAGKETSTPETKKTKRKWRRNFCGWTSHEAEEPLTSETKKKREAGQEASTSETKKTKRKWGRSFCGWTSHEAEEPLTSETKKKRKNGASSSEPDKKRWFKNKIWRKKKAKNKQLATLVKEISLPNSPKARAAAGEILRIGNHNIPSRVFAYSQLSDATNSFSQENLLGEGGFGRVYKGYISETMEVIAVKQLDKDGLQGNREFLVEVLMLSLLHHPHLVTLLGYCTECDQKILVYEYMPLGSLQDHLLDLTPKSQPLSWNTRMKIAVDAARGLEYLHEVANPPVVYRDLKASNILLDGNFSAKLADFGLAKLGPVGDKTHVTTRVMGTYGYCAPEYAMSGKLTKMSDIYCFGVVLLELITGRRAIDTTKPTREQILVHWAAPLFKDKKKFTKMADPKLDSKYPLKGLYQALAISSMCLQEEASSRPLISDVVTALTFLADPNYDPPDDIEPLPITVPDFDRGISLSEPEEVKEKFEGKQVEDS

SEQ ID NO: 51687 - protein, 165 aa, Triticum aestivum
VMASSATTVAPFQGLKSTAGLPVSRRSSASLGSVSNGGRIRCMQVWPIEGIKKFETLSYLPPLSTEALLKQVDYLIRSKWVPCLEFSKVGFVFREHNSSPGYYDGRYWTMWKLPMFGCTDATQVLNEVEEVKKEYPDAYVRVIGFDNLRQVQCVSFIAFRPPGCE

SEQ ID NO: 51688 - protein, 222 aa, Shewanella sp. MR-4
MIDLYTAATPNGFKISIALEEMGLDYRVHKLDFNTNEQKQPEFLAINPNGRIPAIIDRDNEDFVVFESGAILLYLAEKTGKFLPTDPKKRSQVIQWLMFQMSGVGPMMGQANVFYRYFPEKIPAAIERYQKEGRRLFEVMNTQLAKHQYLAGDEYTIADIATWPWVRIHEWSGINMEGLTHLQRWLDELAQRPACQKGIVTPPPSVLSDEERAKQIQKMVTK

SEQ ID NO: 51689 - protein, 165 aa, Secale cereale
VMASSATSVAPFQGLKSTAGLPVSRRSSGSLGSVSNGGRIRCMQVWPIEGIKKFETLSYLPPLSTEALLKQVDYLIRSKWVPCLEFSKVGFVFREHNSSPGYYDGRYWTMWKLPMFGCTDATQVLNEVEEVKKEYPDAYVRVIGFDNLRQVQCVSFIAFRPPGCV

SEQ ID NO: 51690 - protein, 325 aa, Oryza sativa
MDRKKAGVPLVCHGHSRPVVDLFYSPVTPDGCFLISASKDSNPMIRNGDTGDWIGTFEGHKGAVWSCCLDTNALRAASGSADFSAKVWDALTGEELHSFEHKHIVRACAFSEDTHLLLTGGLEKILRIYDMNRPDAAPREIDKSPGSVRTVAWLHSDQSILSCCTDMGGVRLWDVRSGKIAQTLETKATVTSAEVSQDGRFGLVKSYNMPCNVESASLEPKYGNKFIAGGEDMWVHVFDFFTGEEITCNKGHHGPVHCVRFAPGGESYASGSEDGTIRIWQLGPATSDEQESPPNANGKLKVNTVSDAARKIEGFHLPKDGQTEG

SEQ ID NO: 51691 - protein, 542 aa, Leuconostoc mesenteroides subsp. mesenteroides ATCC 8293
MTTTGYSILRNPFLNKGTAFSAAEREQLGLTGTLPSQVQMIEEQAEQAYKQFQAKSPLLEKRTFLMNLFNENVTLFYHLMDQHVSEFMPIVYDPIVAESIEQYNEIYTNPQNAAFLSIDHPENIESSLKSVADGRDIKLVVVTDAEGILGMGDWGVNGVDIAVGKLMVYTAAAGIDPATVLPVSIDAGTNNKILLENPLYLGNKHERIAGEKYLEFIDKFVTAEQKLFPASLLHWEDFGRSNAQVILDKYKDSIATFNDDIQGTGMIVLAGIFGALNISKEKLVDQRFLTFGAGTAGMGIVNQIFSELKQAGLSDAEARSHFYLVDKQGLLFDDTEDLTEAQKAFTRSRKELVNSEQLDNLEAVVNEIRPTVLIGTSTQPGTFTEAIVKSMAQNTERPIIFPLSNPTKLAEATAENLIKWTDGKALIATGIPAANVTYKGVTYKIGQGNNALIYPGLGFGLVASTAKLLTQETISAAIHALGGLVDADEPGAAVLPPVSNLTEFSQKIAEITAQSVLKQGLNREKIADPKQAVQDAKWSAEY

SEQ ID NO: 51692 - protein, 164 aa, Bromus catharticus
VMASSATSVAPFQGLKSTAGLPVSRRSTGLGSVSSGGRIRCMQVWPIEGIKKFETLSYLPPLSTEALLKQIDYLIRSKWVPCLEFSKVGFVFREHNASPGYYDGRYWTMWKLPMFGCTDASQVIKELEEVKKEYPDAYVRIIGFDNLRQVQCVSFIAFKPPGCE

SEQ ID NO: 51693 - protein, 189 aa, Gossypium hirsutum
NTTAAIGKGFAIGSAALVSLALFGAFVSRAAITTVDVLTPKVFIGLIVGAMLPYWFSAMTMKSVGSAALKMVEEVRRQFNTIPGLMEGTAKPDYATCVKISTDASIKEMIPPGALVMLTPFIVGIFFGVETLSGVLAGSLVSGVQVAISASNTGGAWDNAKKYIEAGASEHAKTLGPKGSDPHKAAVIG

SEQ ID NO: 51694 - protein, 313 aa, Bacillus cereus ATCC 14579
MRNVFCIGELLIDFVCRNTNVSLVNGSDFEKKAGGAPANVAAAITKLGGHATFMGQVGNDPFGEFLEQTLQRAQVDTSMLIKDKQTTLAFVSIDQDGERDFTFMRGADGEYQFNSIDLSKIQTNDLIHFGSATALLSSPLKETYFQLLQYAKDKGHFISFDPNYRSALITNTEQFSQDCLTFIKHAHFVKVSQEEATMLSKESDLQQAALKLLNYGAKVVAITLGKDGTLLATNEGQTIVSSISIQQVDTTGAGDAFVGAMLYQIAQSEHTLSYHFKDLTAFISFANKVGAITCTNYGAIASLPSLTDIKAYD

SEQ ID NO: 51695 - protein, 141 aa, Pseudomonas fluorescens PfO-1
MAVQRTFSIIKPDAVAKNVIGKITTRFEDAGLRVVASKLKQLSKAEAEGFYAEHSARGFFGELVAFMTSGPVVVQVLEGENAIARNRELMGATNPKEAAPGTIRADFAESIDANAVHGSDSEAAAAREIAYFFAATEVTTR

SEQ ID NO: 51696 - protein, 161 aa, Shewanella sp. MR-4
MTSTIYSHSANDIQGNPTALAQYQGKVILIVNTASECGFTPQYKGLEALYQKYKAQGLVVLGFPCNQFGAQEKADEKGIQSFCELNFGVSFPLFSKIEVNGEHTHPLYQYLKKAAPGVLGTERIKWNFTKFLVNRQGEVVARFAPTTKPEAISDKIEALLK

SEQ ID NO: 51697 - protein, 199 aa, Oceanobacillus iheyensis HTE831
MNKSTNIVWQKTSVKKADRQHLNNHKSAVLWFTGLSGSGKSTLSSALEKELFSLETHTYHLDGDNVRHGLNKNLGFSPEDREENIRRIGEVSKLMVDAGLITLTAFISPYQEDRDHVRATLAQDEFIEIYVKCSLDMCEARDPKGLYKKARLGEINNFTGIDAPYEEPLHPEIVIDTENQSIEESVQTIIHYLKDKQYI

SEQ ID NO: 51698 - protein, 99 aa, Mycobacterium tuberculosis
AKVNIKPLEDKILVQANEAETTTASGLVIPDTAKEKPQEGTVVAVGPGRWDEDGEKRIPLDVAEGDTVIYSKYGGTEIKYNGEEYLILSARDVLAVVSK

SEQ ID NO: 51699 - protein, 448 aa, Schizophyllum commune
MREVVSIHVGQAGVQIGNACWELYTIEHGLSPDGRLSDDSPSKHDDGFSTFFSETSSGKYVPRSLYVDLEPNVIDEVRNGPYRSLFHPETMITGKEDAASNYARGHYTIGKEQIDVVMDKVRRLVDNCNGLQGFFVFHSFGGGTGSGFGALILERLSTDYGKKSKLEFSVYPAPTLASSVVEPYNSVLTTHTTLEHSDCSFMVDNEAIYDICKKNLNIAQPGLTNLNRLIAQVVSSITASLRFDGSLNVDLNEFQTNLVPFPRIHFPLATLAPIVSVDKAGHESNSVAEMTYSCFEPGNQMVKCDPRDGKYMACALLYRGDVVPKDTNAAVALIKTKRTIQFVDWCPTGFKLGICNEPPAHVPGGDLAKVKRSMCMLSNTTAISSAWSRLDHKFDLLYSKRAFVHWYVGEGMEEGEFSEARQDLAALEKDYEEVGMDSADAEEEAAEY

SEQ ID NO: 51700 - protein, 273 aa, Porphyra purpurea
MIINIHINFFMTTISSVFKKLDKQCALIPFITAGDPDLVSTSKALKILDQHGADIIELGLPYSDPLADGPIIQAASSRALKQSINLNNILDMVNITSSNIVAPIVLFTYYNPVLNLGINNFISAISRAGIKGLLIPDLPIEESDYIISVCKLFNIELIFLLSPTSSIERINKIVEQAPGCIYLVSTTGVTGQKPELTGKLKRLTETIKKMTQKPIILGFGISTAEQIKEIKGWNINGIVIGSAFVKRLSSDFPEEGLRKIKDFCTTAKSIIIS

SEQ ID NO: 51701 - protein, 691 aa, Yarrowia lipolytica CLIB122
MVGYTISSKPVSVEVGPAKPGETAPRRNVIAKDAPVVFPDNDSSLTTVYKLFKKYAEINSERKAMGWRDTIDIHVETKQVTKVVDGVEKKVPKEWKYFEMGPYKWLSYKEALKLVHDYGAGLRHLGIKPKEKMHIYAQTSHRWMLSGLASLSQGIPIVTAYDTLGEEGLTRSLQETNSVIMFTDKALLSSLKVSLKKGTDLRIIIYGGDLTPDDKKAGNTEIDAIKEIVPDMKIYTMDEVVALGREHPHPVEEVDYEDLAFIMYTSGSTGVPKGVVLQHKQILASVAGVTKIIDRSIIGNTDRLLNFLPLAHIFEFVFEMVTFWWGASLGYGTVKTISDLSMKNCKGDIRELKPTIMVGVPAVWEPMRKGILGKIKELSPLMQRVFWASFAAKQRLDENGLPGGSILDSLIFKKVKDATGGCLRYVCNGGAPVSVDTQKFITTLICPMLIGCGLTETTANTTIMSPKSYAFGTIGEPTAAVTLKLIDVPEAGYFAENNQGELCIKGNVVMKEYYKNEEETKKAFSDDGYFLTGDIAEWTANGQLRIIDRRKNLVKTQNGEYIALEKLETQYRSSSYVANLCVYADQNRVKPIALVIPNEGPTKKLAQSLGVDSDDWDAVCSNKKVVKAVLKDMLDTGRSLGLSGIELLQGIVLLPGEWTPQNSYLTAAQKLNRKKIVDDNKKEIDECYEQS

SEQ ID NO: 51702 - protein, 446 aa, Schizophyllum commune
MREVISVHVGQAGVQIGNACWELYTLEHGLSPDGRLMDDSPSKHDSGSTFFSETGQGKHVPRRLYVDLEPGVIDDVKNGPYRSLFHPETMITGKEDAANNYARGHYTVGKELIDPVMDKLRRLADNCSGRQGLFVFHSFGGGTGSGFGALLLERLSTDYGKKAKLEFCVYPAPQLSSSVVEPYNSLLTTHTTLEHSDCSFMVDNEAIYDICKKNLGVAQPGFTNLNRLIAQVVSSITASLRFDGSLNVDLNEFQTNLVPFPRIHFPLASYAPLLSAPRRQHEQNSVEEMTFSCFESGNQMVKCDAKDGKYMACCLLYRGDVVPKDTQAAVASIKTKRTIQFVDWCPTGFKLGVCNEAPATVPGGDLAKVPRSLCMLSNTTAIAAAWNRLDYKFDLMYRKRAFVHWYVGEAMEEGEFSEAREDLAALEKDYEEVGTDSADAEEEGEY

SEQ ID NO: 51703 - protein, 411 aa, Treponema denticola ATCC 35405
MRRVVITGLGAVTPIGNTLDETWEGIKAGKCGIGNITQFDCSDFKIQIAAEVKNFDASQFMDKKDARKMARFTQFAVAAASQAMKDAGLSKENIDANRTGIILGNGIGGFEIYQEAFKKYFQVAPDRIPPMTVPLLIPNEAAGNISMQFGIKGPSWTLATACASGTDALGNALDLVRSGRLDVCVSGGTEATITGFGISGFTILQTLASGDPAKACCPFDKKRSGFVMGEGSGILILEEYEHAKKRGAKIYAEFAGYGASSDAYHLTSPDPSGDGGALAITNALADAGVKPEEVQYYNAHGTSTPINDPAETAMIKKAFGDHAYKMKVSSTKSMIGHCLGAAGALEAIFCIKAMEEGFYPPTINLTEPDLEAGCDLDYVPNKGVKGEINCAASGSLGFGGHNGVAVFKKIK

SEQ ID NO: 51704 - protein, 143 aa, Populus tremula
MISPSFISPLFTLAVVLTVTITPLISASGGFCQEKMATLGGVHDSQSSQNSAEIDGLARFAVDEHNKKENAILEFARVVKAKEQVVAGTMHHLTIEAIEAGKKKLYEAKVWVKPWLNFKELHEFKDAGDVPVFTSSDLGVKRG

SEQ ID NO: 51705 - protein, 143 aa, Populus tremula
MISPSFISPLFALAVVLTVTITPLISASGGFCQEKMATLGGVHDSQSSQNSAEIDGLARFAVDEHNKKENAILEFARVVKAKEQVFAGTMHHLTIEAIEAGKKKLYEAKVWVKPWLNFKELHEFKDAGDVPVFTSSDLGVKRG

SEQ ID NO: 51706 - protein, 155 aa, Zea mays
MSLVRRSSVFDPFSVDLFDPFDSMFRSIVPSSSSAAAAASETAAFASARIDWKETPEAHVFKADLPGVKKEEVKVEVEDGNVLLISGQRSREKEDKGDKWHRVERSSGQFVRRFRLPENAKTEEVRAALENGVLTVTVPKAEVKKPEVKSIQISG

SEQ ID NO: 51707 - protein, 463 aa, Magnaporthe grisea 70-15
MRVRLPGAASSIGRRCRNHGRGAPKIGSLHQTAPGSASSMRAASTLKQKPDSSFVSFPGAVKSEFTTKFQFERPEQYPAMPTYRVVDQHGVVVDPEFEQDLNDEGVIKLYEDMVAVSVMDSIMFDAQRQGRVSFYMVSAGEEAVCVGSASALEMRDVIFCQYREQGVYRHRGMTFRDFMNQLFANKYDPGQGRNMPVHYGSKELNMHTISSPLATQIPQASGAAYAMKMQRIANPDAPERVAVVYFGEGAASEGDFHAALNIAATRACPVIFICRNNGYSISTPSLEQYKGDGIASRGVGYGIDTVRVDGNDIWAVRKATKKARELALENGGKPVLLECLTYRVGHHSTSDDSFAYRARVEVEDWKRRDNPISRLRKWMESKDMWDDDKEKVMRDRLRKEILKAFSEAEKEKKPPIRAMFEDVYEEMTPDLKKQMAELKDHIERYPEEYDVGEFEGGKDSLKP

SEQ ID NO: 51708 - protein, 463 aa, Oryza sativa (japonica cultivar-group)
MGMLRWGAHLLLLLLAAATWTCAGAGAGVTSEYRRKLEATVDMPLDADVFRVPPGYNAPQQVHITLGDQTGTAMTVSWVTANELGSNTVRYGSSPEKLDRAAEGSHTRYDYFNYTSGFIHHCTLTGLTHATKYYYAMGFDHTVRTFSFTTPPKPAPDAPFKFGLIGDLGQTFDSNSTLAHYEANGGDAVLFVGDLSYADNYPLHDNNRWDTWARFVERSVAYQPWIWTAGNHELDYAPELGETVPFKPFTHRYPTPYRAAGSTEPFWYSVKIASAHVIVLASYSAYGKYTPQWTWLQEELATRVDRKLTPWLIVLMHSPWYNSNNYHYMEGETMRVQFERWLVDAKVDVVLAGHVHSYERSRRFANIDYNIVNGKATPAANVDAPVYITIGDGGNIEGIANNFTVPQPAYSAFREASFGHATLEIKNRTHAHYAWHRNHDGAKAVADAVWLTNRYWMPTNDDV

SEQ ID NO: 51709 - protein, 472 aa, Geobacter metallireducens GS-15
MRICRLFIVIIALFTVVPACSKKEDKLFYETGRAEAPVKDVPKDIMATQQAFVELVKKVTPSVVNISTISRKKVEQPFFEFSPLFGDLFGDGRPRYRRDKSLGSGFIINKSGYIVTNDHVVRDAETIKVRLSNENVYDGRVVGSDPKTDIAVIKIDAKEDLPVAVLADSDKLQVGQWAIAIGNPFGLDRTVTVGVVSATGRSNMGIETYEDFIQTDASINPGNSGGPLLNVHGEVIGINTAIVAAGQGIGFAIPVNMAKQIVTQLVTKGSVSRGWLGVSIQPVTDEIAREFGLKKARGVLVADVVEGSPAAKGGIKQGDIILDFAGTEIKDAQHLQRVVAATAPGKTVQVTVFRGGREVKLSLTSASADSAGARQARPQGEEPDLLGLMVEEIPSDLRRRGVSGVVVAEVDEEGIAAEAGIQRGDIIVSVNRKGVATRAEYERAMAEAGRRGTAILLVRRGNASIFFSLRLR

SEQ ID NO: 51710 - protein, 586 aa, Bacillus thuringiensis serovar konkukian str. 97-27
MEVRDEIKKKGNWRQFLRLIQDTKPPKGILVFALLMSLLSTGASLFIPMLTKGLVDNFSLSSISTGQIVGLVAFFIMQTIAAGLSIYLLNYIGQKIVAGLRERLWKKVLILPVSYYDQNRTGDTISRMTNDTGVVKTLISEHLSNLLTGGISIVGSLIVLFVLDWKMTLLLLTVIPLSVLILVPLGRKMYKISKALQDETASFTSVLTQVLSEIRLVKSSNTEKREYETGNKGIEKLLQFGLKEGKVQALISPVMSFVLMALLVIIVGYGGMRVSSGALTTGELVAFILYLVQIIMPMSQLSMFFTQFQKAIGATERIYTILEYEVEDHETGVNVTNAKQPIVLENVYFEYNEEEQVLKNIDFTIESGKVTAIVGPSGSGKTTLFSLLERFYEPTTGAIKLGEEPITAYSLPSWRRQIGYVSQDSPLIDGTIRDNICYGVEGEVTDEEIEKVAAMAYVDAFIHDLPNGYATEVGERGVKLSGGQRQRIAIARALLRNPQILMLDEATSSLDSKSESVVQKALNNLMKGRTTLVIAHRLSTVVDADKIIFIEKGNLTGSGTHDELLRTHDMYREFATQQLKIKEAAL

SEQ ID NO: 51711 - protein, 660 aa, GIBBERELLA ZEAE PH-1
MGVVTPKAADKSRATQAHYLHNFPDNMAHTSGVTPLYQVYKPPFTVESPDYEKRPGETVPRRHPRARDGLIERPADDVYTVFDIVRRSARLYPDSRAVGWRKLIKLHKETTKVEKKIDGKVQLVDKEWTYFELTPFSFYTYKEYEQHCLRLGSGLRKLGMEAGNKLFLFASSSCVTQSISIVTAYDSLGQSGLEHSLLQSQAEVLYIDPYLLKTATEPLKKSKVHTIIVNEASIFGGLDTVEAFKSANPNFKVISFDEVCELGKTTPVDPVFPKPDDLYCVMYTSGSGGVPKGVRIAHRNLVAGDCVTHKDVLLAYLPLAHVLEMALENLGMFFGGTVGYGNPRTVSDTSVRNCEGDMRALKPTVMPGVPQVYETIRKGIMTRLNSSVLLKTLFWRAFAYKSFMVKHNLPGALLLDGIVFGKIREMTGGKIRFLFNGGSPISLSTKHFLSMVLAPMFTGYGLTETCAVGALGSPLEFTLHSIGTVPASAEVKLVSVPEFGYSADADTPQGEILIKGPAVMMGYYENEEETKRSFTDDGWFKTGDVGEFDSDGHLRIIDRIKNIVKLLSGEYVALEKLDSIYRGAQGVMNAMAYADSLHARPIAVVMPNETVLASIAKDLGVDEHSIYTDNKGLVTATQKLNRRAINARYKTEIDKALEQA

SEQ ID NO: 51712 - protein, 418 aa, Chlamydia trachomatis D/UW-3/CX
MNKKRVVVTGMGIVSCLGNEVESFYDSLLAGISGVRTITSFPCDDYATRFAGWIEEFNSEPYLDKKQARRVDPFITYAVVAAKKAIAMSRWDQDTLPADSHRCGVIIGSGMGGLRTLDEGIEKLSAGNRKLSPFFIPYIITNMAPALIAMDYGLMGPNYSISTACATANYCIDAAYQHLIEGRADVIVCGGTEAAINRVGLAGFIANRALSERNDAPEQASRPWDRDRDGFVLGEGAGILVLETLDNALKRGAPIFAEVLGTYTTCDAFHITAPRDDGEGITACILGALNKAGIPKERVNYINAHGTSTPLGDLSEVLALKKAFGSHVKNLRMNSTKSLIGHCLGAAGGVEAVATIQAIQTGKLHPTINVENPIAEIEEFDVVANKAQDWDVDVAMSNSFGFGGHNSTILFSRYEPSL

SEQ ID NO: 51713 - protein, 304 aa, Methanopyrus kandleri AV19
MRPVVTVVGSHPVGHEPTLKDRLLEKLRRRSAYAPAIHEAVRDQTEAGVELVSDGQVRGDMIEIFASHIPGMTVEDGPAVIGRVEPPRFSPLVLDYREATRVAGEVEVKAILTGPVTLCYSLEVRTDLYPSNDHSSLLKDVARALSAEARLLRREGASVLQVDEPILSAGVTSVKKVARYVNTVLKAFKGGTRVLHVCGDVTEVYLDLEENIDADVFDHEFAGHPENLEVVAEGDSPIGVGVVRSDTDRVESLDEVVGLLEKAREAMGDRIEFVDPDCGLRKLPREIAKKKLEVVRKARDRVFR

SEQ ID NO: 51714 - protein, 607 aa, Magnetospirillum magnetotacticum MS-1
MVRPHVRTGVVNPLSKQKISFDHSTWVLVRRLFNEGMRPYMGKVTAAVFCMVVGAAANAGYALLMDPVVNKIFTEKRPEFLVPLAAAVLATFAVKSVCNYGEAVFLSKVGLRVIADMQARLFAHLMRLDIAFFHANSTGRILSRLTNDISQMRFAVSDALTGAGKDASSVIFLIGAMFYQDWRLSAWTFFIFPIAILPIRKLGRRMRKVTANTQEHMGQLTTYLEQAVQGIRVVKAYGMEDYEKRKVGALVEMLQDLIYKAARVRSASSPIMELLGGIAITVVILYGGTRVVEGETTPGAFFSFITALMLAYRPIKSLAAMNTNLQEGLAAAARTFSVLDTQPTIFEKDGAPDLVVLEGNVSFEGVFFTYDGAKAVLDGIDLAVPGGKTVALVGPSGAGKSTVLNLLPRFYDVTDGHVLVDGQDVRGVSLASLRSKIALVSQEITLFDDTIRANIAYGRFGATDEEIEAAARSAAAHDFIVSLPEGYDTLVGERGLNLSGGQRQRLAIARAMLKNAPILLLDEATSALDTESERQVQTALELLMRGRTTIVIAHRLSTVVNADLIHVLDKGRVIESGDHNALIARDGTYARLYAMQFAEEATKVTGG

SEQ ID NO: 51715 - protein, 544 aa, Bartonella bacilliformis
MAAKEVKFGRDARERLLRGVDILADAVKVTLGPKGRNVVIDKSFGAPRITKDGVSVAKEIELENKFENMGAQMLREVASKTNDIAGDGTTTATVLGQAIVQEGVKAVAASMNPMDLKRGIDAAVEAVVADLFKKAKKIQTSEEIAQVATISANGAEDIGKMIADAMEKVGNEGVITVEEAKTAETELEVVEGMQFDRGYLSPYFVTNSEKMMVDLDDPYILIHEKKLSNLQSLLPVLEAVAQSGKPLLIIAEDVEGEALATLVVNKLRGGLKIAAVKAPGFGDRRKAMLEDIAVLTSGQVISEDVGIKLENVTLEMLGRAKKVHVSKETTTIVDGAGQKSEINARVSQIKAQIEETTSDYDREKLQERLAKLAGGVAVIRVGGSTEVEVKEKKDRVDDALNATRAAVEEGIVPGGGTPLLRAAKALSIKGKNPDQEAGIGIIRRALQAPARQIAHNAGEEAAVIVGKVLENCSDTFGYNTATAQFRDLISFGIVDPVKVVRSALQNAASIASLLITTEAMVAEVPKKEAAAPAMPGGGMGGMDF

SEQ ID NO: 51716 - protein, 570 aa, Aspergillus niger
MQGPLYIGFDLSTQQLKGLVVNSDLKVVYVSKFDFDADSRGFPIKKGVLTNEAEHEVFAPVALWLQALDGVLEGLRKQGMDFSQIKGISGAGQQHGSVYWGENAEKLLKELDASKTLEEQLDGAFSHPFSPNWQDSSTQKECDEFDAALGGQSELAFATGSKAHHRFTGPQIMRFQRKYPDVYKKTSRISLVSSFIASLFLGHIAPMDISDVCGMNLWNIKKGAYDEKLLQLCAGSSGVDDLKRKLGDVPEDGGIHLGPIDRYYVERYGFSPDCTIIPATGDNPATILALPLRASDAMVSLGTSTTFLMSTPSYKPDPATHFFNHPTTAGLYMFMLCYKNGGLARELVRDAVNEKLGEKPSTSWANFDKVTLETPPMGQKADSDPMKLGLFFPRPEIVPNLRSGQWRFDYNPKDGSLQPSNGGWDEPFDEARAIVESQMLSLRLRSRGLTQSPGEGIPAQPRRVYLVGGGSKNKAIAKVAGEILGGSEGVYKLEIGDNACALGAAYKAVWAMERAEGQTFEDLIGKRWHEEEFIEKIADGYQPGVFERYGQAVEGFEKMELEVLRQEGKH

SEQ ID NO: 51717 - protein, 346 aa, Chlamydia trachomatis D/UW-3/CX
MKYSLQIEDLHIEGYEQVLKVTCESVQLVAVIAIHQTKVGPALGGIRAFPYLQFEDGLQDALRLSKAMTYKALLSSTETGGGKSVIFLPKGMTSPTEGMLRAFGQAVNSLQGKYIAAEDVGVSVQDVMIIREETPYVCGLVTVSGDPSIYTAHGVFLCIQETADYLCKTDIRGKRVAVQGLGAVGRKLVHELFFAGAELIVYDTRKDLLDEVVTLYGAQVDENIISADCDILCPCALGGIINSMSIDQLRCRAIVGATNNQLENPAIGRELVARGILYAPDYLANAGGLLNVAGSVGRAYSPKEVLSKVEGLPKILRKLYEQGAKENRDTGTLADAIVEERLAVYA

SEQ ID NO: 51718 - protein, 767 aa, Oryza sativa
MGSACEAGTDEPSRDDVKGTGNGILENGHSHKPEEEEWRNGMGEDLPNGHSTPPEPQQTDEQKEHQVRIVRWERFLPVKTLRVLLVENDDSTRQVVSALLRKCCYEVIPAENGLHAWQCLEDLQNHIDLVLTEVVMPRLSGIGLLSKITSHKICKDIPVIMMSSNDSMGTVFKCLSKGAVDFLVKPIRKNELKNLWQHVWRRCHSSSGSGSESGIRTQKCTKPKVDDEYENNSGSNNDNEDDDDNDEDDDDLSVGHNARDGSDNGSGTQSSWTKRAVEIDSPQQMSPDQPSDLPDSTCAQVIHPTSEICSNRWLPTANKRSGKKHKENNDDSMGKYLEIGAPRNSSMEYQSSPREMSVNPTEKQHETLMPQSKTTRETDSRNTQNEPTTQTVDLISSIARSTDDKQVVRINNAPDCSSKVPDGNDKNRDSLIDMTSEELGLKRLKTTGSATEIHDERNILKRSDLSAFTRYHTTVASNQGGAGFGGSCSPQDNSSEALKTDSNCKVKSNSDAAEIKQGSNGSSNNNDMGSSTKNAITKPSSNRGKVISPSAVKATQHTSAFHPVQRQTSPANVVGKDKVDEGIANGVNVGHPVDVQNSFMQHHHHVHYYVHVMTQQQQQPSIERGSSDAQCGSSNVFDPPIEGHAANYSVNGSFSGGHNGNNGQRGPSTAPNVGRPNMETVNGIVDENGAGGGNGSGSGSGNDLYQNGVCYREAALNKFRQKRKVRNFGKKVRYQSRKRLAEQRPRIRGQFVRQSGQEDQAGQDEDR

SEQ ID NO: 51719 - protein, 453 aa, Galactomyces geotrichum
MREIVSIQCGQAGMNQVSTAFWSTITDEHGLDADGHLRPDASSLESDRLDVFFNEASNKKYVPRAVAVDLEPATLDAIRSGPLGHIYRPDNLISGESGAGNNWAKGFYTEGAELMDSVMDIIRREAEQSESLQGFQLAHSLGGGTGSGLGTLLLTKIREEYPDRMLSTYSVLPSPKVSDTVTEPYNAVLSFHQLIDNADATYCLDNEALYDICEKTLKINRPSHQDLNSLIALVMSGVTTGLRYPGQLNGDLRKLAVNLVPFPRLHFFTTGFAPLFAKNSRAFHNLTVPELTQQLFNPANVMAACNPYHGRYLTISTIFRGQVAMKEVEDAIHTARTKYSPYFVEWIPNNVQTSVCNVPPKGLTTSATFIANSTAVQELFERTANQFSVMFKRKGFLHWYTGEGMEPVEFSEAQSDLEDLILEYQQYQNAGVDEDEELMDHEEYADEGVEDFN

SEQ ID NO: 51720 - protein, 352 aa, Bacillus anthracis str. 'Ames Ancestor'
MTIDRVCTIGPASNNKETLAKLINNGMKIVRLNLSHGTHESHKDIIRLVKSLDDSIKILGDVQGPKIRLGEIKGEQITLQAGDSFMLRTQPVTGSSTEASVDYEGIANDVKVGSRILMNDGEVELIVEKVSTDKIETKVKTGGNISSHKGVNLPGAIVSLPAITEKDKKDIQFLLEEDVDFIACSFVRKPSHIKEIRDFIQQYKETSPNLIAKIETMEAIENFQDICKEADGIMIARGDLGVELPYQFIPLLQKMMIQECNRTNTYVITATQMLQSMVDHSIPTRAEVTDVFQAVLDGTNAVMLSAESASGEHPVESVSTLRLVSEFAEHVKKDGPFVMKDVLELLHKSLDE

SEQ ID NO: 51721 - protein, 294 aa, Rubrobacter xylanophilus DSM 9941
MATDLTRRPENARAGREPETPELLAKYLAHIGQGELLTHQEEIELSRRAKKGDRKARQKLIEKNLRLVVSVAKKYRGYGLPFEDLIQEGNIGLMKAVEKFDPERGFRFSTYATWWIRQAVQRAVADKGRTIRVPVHMTEKIRKVSRTFNELSLELEREPTDEEIARRLEWDVEDVRLTISAMPDATSLDQPVSSEESASELGDFIEDERTSDTPDTVLKELESSQLKEAIERLPERARYVLVRRYGLDDREPATLAELGDELKISRERVRQLQREAERILKSGEHGRVLRNAVA

SEQ ID NO: 51722 - protein, 170 aa, Glycine max
  misc_feature (127)..(127): Xaa can be any naturally occurring amino acid
  misc_feature (159)..(159): Xaa can be any naturally occurring amino acid
  misc_feature (165)..(165): Xaa can be any naturally occurring amino acid
  unsure (1)..(170): unsure at all Xaa locations
MLASLTMERYEIIKDIGSGNFGVAKLVKEKWSGELYAIKFIERGFKIDEHVQREIINHRSLKHPNIIRFKEARYFFQQLISGVSYCHSMEICHRDLKLENTLLDGSSAPRLKICDFGYSKSSVLHSXPKSTVGTPAYIHQRFCKKKYDGKVADVWSCGXTLYVMXVEHIL

SEQ ID NO: 51723 - protein, 128 aa, Pseudomonas fluorescens PfO-1
MAYSEKVIDHYENPRNVGKMNAEDPDVGTGMVGAPACGDVMRLQIKVNDQGVIEDAKFKTYGCGSAIASSSLATEWMKGKTLDEAETIKNTQLAEELALPPVKIHCSVLAEDAIKAAVRDYKQKKGLI

SEQ ID NO: 51724 - protein, 145 aa, Bacillus cereus E33L
MRNLFPEITKRQNSIFDFGPSLLEGMTDAFFKPMNMDTFKVDVHEQSDKYTVKADLPGFQKENIQVEFEQDVLTIQATNHNEVEEKNENGTYIRKERSIGSVTRRFSFKQVEEENVRANYKDGVLTIELPKLKEEKNSKTTINIE

SEQ ID NO: 51725 - protein, 707 aa, Burkholderia fungorum LB400
MAGKTNTQKPAAKNAQASGPQSDPKAKDLEQFRVSPEGEALRTNQGVKISDNQNTLRAGPRGPSLLEDFIMREKITHFDHERIPERIVHARGSAAHGVFQVYESMQEYTKAAFLQDPAVQTPVYVRFSTVQGPRGSADTVRDVRGFAVKFYTQEGNYDLVGNNMPVFFIQDAIKFPDFVHAVKPEAPNEMPTGGSAHDTFWDFVSLVPESAHMVLWTMSDRAIPRSLRTMEGFGIHTFRFVNAQGKGRFVKFHWRPVLGSYSLLWDEAQKLAGKDPDFHRRDLWESIERGDFPEFELGVQIIEEADEHKFDFDLLDPTKLIPEEQVPVKIIGKMTLNRNPDNFFAETEQVAFHPGHVVPGIDFSNDPLLQGRLFSYTDTQISRLGGPNFHEIPINRPVCPFNNNQRDAMHRQTINVGQASYEPNSLSGGWPKETDPAPSDGGFETYQERVEGTKIRVRSESFADHFSQAALFYNSMSPPEKDHIAAAYQFELGKVTKPEIRARVVNEILANFDAGLAAQVAEGLGLPAPKKGTAKLTGPKESPALSLLNRVKPGIKTRKIALLAAPGSDGAAIKKLQQALQGEGATPMLIAPTLAAIDGMAPDATIAGLPSIMFDAVIVVGGDQGAKALAQSGDARHFVLEAFKHLKAIAAIGAGRDVLAAAHLPHNADGVATGDDKQAAEVLKAFIEAAGQHRVWSRAQQAETVPA

SEQ ID NO: 51726 - protein, 1194 aa, Burkholderia fungorum LB400
MTASQAVDQNRFRSIIRRNIALPLGVGLVTMAVFVGLIAYLVSTMNWAEHSERVIGQANEMLRLAVDRESSMRGFLITGDESFLTPYEEGGPRFKTQIEALQELVSDNPPQVEKLKQIEAIQQRWSVYAEQMIDARRRNQDFESAVASGRGKIEFDETRREFGDFLDVELRLRQERAEATRRVTTTLVSVFLLFSLSVSGLLAWMGRRELMSLSSTYDNALRQQAEQTEMLQEQVWLRSGQRLLAEKVVGQATPPLVGRAMLDFLAQYLDAAVAALYVRDKRHGTLRRIATYGFSRESEQATARNFEEGETLIGQAAAARRTLVLRDVPENYVQVVSATGKSAPKNLLIMPIENDGEVNGVVELGFVRELTPRDQEFMELIASSMGDFVEAALYRERLQDALAETQQLNEELQVQQEELRVSNEGLEERGRALMESQTRLEAQQAELEQTNVQLEEYAQRLERQKSDLLRAQDDLAANAARLEQSSRYKSEFLANMSHELRTPLNSSLILAKLLQQNRAGNLTEEQVRYAETIHASNSDLLVLINDILDLSKVEAGQVTVELETVSIDATLQALEEMFKPMAAARQLRLAFERLPGTPDTFISDGQRVTQILRNLLSNAVKFTEHGEVALSVAPAEGGMLRIDVRDSGIGIAPDKLDMIFEAFQQADGSTSRQYGGSGLGLSISREFSRLLGGRITVASEVGKGSVFTLWLPLDAEAALSASEGAAAPTPPSAPVPAQASARGAAGSMAEPLLTRPSSSGGAATVITPANGLTSGPTSGLTTGNASETPIGPIADDRDNRTRAGRLIVAVEDDVAFAEILRDLTHELDFDFVHASDAASGLALVRDMRPAAVLLDVGLPDRSGLTVLEWLKNDPLTRHIPIHIVSATDHADKALHLGAIGYTLKPTARSTMEAAIRRLEARLQQRLKRVLVIEDDTPMRESIRALLQSENTEIVAVATLAEALDYLAKVTFDCVVTDLALPDGTGYDLLERLAANTAHVSLPVIVYTGRMLSDEEEHRLRRYSKSIIIKGAKSPERLLDEVTLFLHSVESSLAPEQQRMLRTVRQRDNAFEGRTILLAEDDVRNIFALSHVLEPLGAKLQIARNGREALDALENGPEVHLILMDIMMPEMDGLTAMGEIRRNPRFAHLPIIALTAKAMANDRTRCLEAGADDYVSKPIDVDKLVALCRVWLRQR

SEQ ID NO: 51727 - protein, 386 aa, Zea mays
MVSGAAPNPDGGGAQNTQRPPPLTQAGARTALATPPAVSGGAAHSASTSGGSAGSPPSSRSEQHAPDGAAKGPALGAAPAAAASTPASDSTFLRLNNLDINGDDAPSSQAPTSKKKRRGTRAVGPDKGNRGLRQFSMKVCEKVESKGRTTYNEVADELVAEFTDPNNNIEAPDPDNPNAQQYDEKNIRRRVYDALNVLMAMDIISKDKKEIQWKGLPRTSISDIEEMKTELVGLKGRIEKKSAYLQELQDQYVGLQNLIQRNEQSYGSGNTPSGGVALPFILVQTRPHATVEVEISEDMQLVHFDFNSTPFELHDDSYVLKEMRFCGREQHDSTQESISNGGESSSVSNIYWQHVQHVERPNNGTGRLPSSPPIPGILKGRAKHEH

SEQ ID NO: 51728 - protein, 666 aa, Oceanobacillus iheyensis HTE831
MSGKVEQLSINTIRTLSIDAIENANSGHPGLPMGAAPMAYTLWTDFMNHHPKNSKWFNRDRFVLSAGHGSMLLYSLLHLSGYDVSIEDLKGFRQWDSKTPGHPEVHHTDGVEATTGPLGQGIAMSVGMAMAEAHLGATFNKDKYSVVDHYTYALVSDGDLMEGISHESASLAGHLGLGKLIALYDSNDISLDGDLDRSFSEETEKRFEAYGWQVLRVEDGNDVNAIREAIKEAQRNTKQPTLIEVKTIIGYGSPNKSASAASHGAPLGEDEIILTKEYYEWEHEPFHVPDEVYADFQEKIVNDGEKKEAAWNQLVEEYKKSYPELGEQFDLAIKGQLPEGWEKELPIYEPGSSIATRASSGEVLNAVAKAVPNFFGGSADLAGSNKTTIKEEGDFTKEDYSGRNVWFGVREHAMGAALNGMALHGGLQVFAGTFFVFSDYLRPAVRLAAIMNMPVNFVFTHDSIAVGEDGPTHEPIEQLASLRAVPNLSLIRPADANEVQAAWRLALESEHQPTALVLTRQNLPTLEGTKENAYEGVKKGAYVISKSEKETPDALLLATGSEVQLAVRAQETLKEKGIDVQVVSMPSWDRFEAQEDAYKNEVLPKEVKARVGIEMAASFGWERYVGLDGKVIGINRFGASAKGDKVIEEYGFTVENVVKHVEDLLK

SEQ ID NO: 51729 - protein, 1108 aa, Pseudomonas syringae pv. tomato str. DC3000
MAKKPDAATFIKDPLWYKDAVIYQVHVKSFFDANNDGIGDFAGLIEKLDYIAALGVNTIWLLPFYPSPRRDDGYDISEYRDVHSDYGTMADAKRFIAQAHKRGLRVISELVINHTSDQHPWFQKARNAKPGSKARDFYVWSDTDQKYDGTRIIFLDTETSNWTWDPVAGQYFWHRFYSHQPDLNFDNPHVLDAVLEVMRFWLDLGIDGLRLDAIPYLIERDGTNNENLPETHQVLKRIRAEIDANYPDRMLLAEANQWPEDTQLYFGDSKGPDGDECHMAFHFPLMPRMYMALAQEDRFPITDILRQTPEIPENCQWAIFLRNHDELTLEMVTDRERDYLWNYYAADRRARINLGIRRRLAPLVERDRRRVELLNSMLLSMPGTPTLYYGDEIGMGDNIYLGDRDGVRTPMQWSIDRNGGFSRADPASLVLPPIMDPMYGFQSVNVESQERDPHSLLNWNRRMLAVRKQQKAFGRGTLKMLSPSNRRILAYTREYTAPDGHSEVVLCVANVSSAAQAAELDLSGYAGTVPVEMLGGSAFPPIGQLNYLLTLPPYGFYWFLLATENQMPSWHVEPAQSMPDFPTLVLKKRLEELLEEPLRSTMEDTSLTVYLPKRRWFAGKDKAIEKVNIAYAVRFGDEAHPVLLSEIEVTAGGQTDRYQLPFGLLGEDDISSALPQQLALARVRRSRDVGLITDAFTLETFIRAVIQGMQSDTVIPCADGQLRFEQSSQLAPLGLTHESEVRYLSAEQSNSSVVVGSSLVLKLIRKVSAGTHPELEMGAFLTHAGFKNISPLLGSLVRVGNDGQPNLLMIAQGYLSNQGDAWEWTQNNLERAVRDELAHGVSGQEQHYNALLELADFSRSLGQRLGEMHQILASPTDNADFAVEITSAQDSKASATSVNAQLERALQLLEQRKGDLDKDDQQLVSDLLAHRKQIRQRVEGLAKRSAGGLRIRVHGDLHLGQVLVVKGDAYLIDFEGEPARALEERRAKHSPFKDVSGVLRSFDYAAAMAVRSAQSVDTSPQAAAARKQVAETYLAQAREAFIEGYRLATSGIAHAWKDAKGEDSALELFTLEKAAYEVIYEAENRPAWLAVPLQGLRGLLQPSDGEPI

SEQ ID NO: 51730 - protein, 219 aa, Oryza sativa
GQIFVKTLTGKTITLEVESSDTIDNVKAKIQDKEGIPPDQQRLIFAGKQLEDGRTLADYNIQKESTLHLVLRLRGGMQIFVKTLTGKTITLEVESSDTIDNVKAKIQDKEGIPPDQQRLIFAGKQLEDGRTLADYNIQKESTLHLVLRLRGGMQIFVKTLTGKTITLEVESSDTIDNVKAKIQDKEGIHQTSKRLIFAGKQLEDGRTLADYNIQKESTL

SEQ ID NO: 51731 - protein, 656 aa, Porphyra purpurea
MFSFRNQQVLTFVSSLSTFVTIILNHLKKWWSDVTLRTRLMAMTTLMVSLLMSSLTFWTLTSIQQETRLIDNRFGKDLSLLLAVNITPILEGDNYLQLQQFIEHFYLSTSSIRYILVFNADGQIYYSIPFSSETAINFFSLSEYNCFRNENHYFSNTPIVNTNNRLQGEVIDIIIPLSKEKKLLGILNIGINSNPTLTTSSQLTRDVSVAVFISIWLMVILGAAFNAFTITRPIRELLTGVKNIASGDFYQRIDLPFGGELGALIFNFNEMAERLEKYEQQNVEKLTSEKAKLETLVSTIADGAILLDKDLRVILVNRTAIENFGWEGKNIAGSIIVDYLPEDINQQLFPILNDIIRKNFLEQSICETQEICIKLQKNYKKTFRVLLTTVLDHKYSILKGIAMTIQDRTQEVELNEIKNQFISNVSHELRTPLFNIRSFLETLYEYHDSLDDSQKLEFLAIANKETGRLTRLVNDVLDLSRLESDQEYTLQPTDLVSAVEQTIRTYQLSAKDKRIDLHIDIEQNLQCVLGNYNLILQILANLVVNSLKFTHPNGIIILRAYTVDDLKTETEVQHFNSQKVRVEICDNGIGISRKNQERIFARFLRIENYVHTLEGTGLGLSIVKNIIQKHNSEIHLYSELKNGSCFFFDLMIAKDE

SEQ ID NO: 51732 - protein, 480 aa, Lactobacillus johnsonii NCC 533
MTISNKVMLITYPDSLGKNIKDLDDVLHTDLKGAVGGVHLLPFFPSTGDRGFAPTDYSMVDPQFGDWSDVEKLGEDYYLMFDFMINHISRQSKYYKDFQKNKDQSPYADLFLSWDKFWPKNRPTQKDIDLIYKRKDRAPYQEITFADGSKEKLWNTFGEEQIDLDVRKDVTKQFIKQTLNNLIDHGSDIIRLDAFAYAIKKLDTNDFFVEPEIWDLLKEVQDDISAKGALILPEIHEHYSMPFKIARHGYFIYDFALPMVVLYSLYSGKSQRLASWLKKSPMKQFTTLDTHDGIGVVDARDILTPNEIGYTSNELYKVGANVKKKYSSAEYHNLDIYQINSTFYSALGDDDKKYFMARLLQVFAPGIPQVYYVGMLAGKNDIELLEKTKEGRNINRHYYSREEIHEEVQRPVVSSLINLLRFRNNEAAFDLNGSIEVTTPTENEIHIIRLNQDKTRKAELRANLETLAYKVLVNGREMAF

SEQ ID NO: 51733 - protein, 381 aa, Oryza sativa (japonica cultivar-group)
MVAAAVGGYGGGGGSLLPSRLPPAPDPAAMAVSAASARGGGNSIKHIHLSYCAFRPTGGLKFLRRLHLREVHITGDELECLLSNSFALEQLTLKHCKELNYLRIPCKLQQLKDLEVYECKALQMMEVKAPNLSTFYYDGNLARLSDGGLLAVKKLHISSFYRYNNVHYASANLSSIVPTIETLIISSFGEEVNTVVAPFKFLHLKSLMINLIGFNGAFSPAYDYLSLAYFIDVSPVLETFTLIVSQIRMEHDVISEDSSHLRQMPRSIHGNIKNVNIIGFCSAKSMIELTCHILENATSLECLTLDTIHDDYVHPDRLSVHEVGFCGCIGSPMIMEAENALLAIKRYIVGKVPSTVKLVVLKPCGWCHATKGLGVKDHRVA

SEQ ID NO: 51734 - protein, 143 aa, Populus tremula
MISPSFISPLFTLAVVLTVTITPLISASGGFCQEKMATLGGVHDSQSSQNSAEIDGLARFAVDEHNKKENAILEFARVVKAKEQVFAGTMHHLTIEAIEAGKKKLYEAKVWVKPWLNFKELHEFKDAGDVPVFTSSDLGVKRG

SEQ ID NO: 51735 - protein, 350 aa, Burkholderia mallei ATCC 23344
MSSTLKIGLMGFGFAGATFHAPVITHSGRTRLAAIATGQPERAAAAYPEAAVVPDLDALAARDDVECVVIATPNDTHVDLAKRALEAGKHVVVDKPVALSAADALVLARLAAARGRVFAPFHNRRWDGDFLTVRQLVESGELGRIVCFESHFDRFRPHVRTRWREEAARGGGLLFDLGPHLIDQALALFGPPETVSATVKTRRDGGDAPDFVHLQLGYPDKDVVLHASALAAIEPARFTVLGTQGGYQKHGLDTQEDQLKAGLTPDDVEFGGGNPPGVLRGLDGELEVERPVPTLDGQYAEFYRALAASIHDGAPFPVAPQDAVDVMTIIETAMRSEREGRRLPFVREAV

SEQ ID NO: 51736 - protein, 367 aa, Geobacter metallireducens GS-15
MNSVRKIRQISGVVGILKNGDGPTVMLRADMDAMPMKEDTGVPYASTKEGANAKGETVPVAHSCGHDMHTSWLLGAATVLSLARETWHGTLMTVFQPAEETAQGSQAMLDDGLMERFPRPDVILGQHLLPFRAGTVGYHSGQILTSGDSLLVRFFGKGAHGGMPQNGIDPIVMAASAVLRLQTIVSREISPQAQVVVTVGEFHGGTAENIIPAEAYIKLNVRTTDEAVRDHVLAAIRRICVAEARASNAPKDPEFEEINNYPLTVNDAEVTRKVADAFRGQFGDQLFEAPSQGASEDFGRFGQAWKSPYMYWFVGGSDPEKYDQAVREGGVERLPGPHSPFWAPVLYPTLQTGLETMLTAAGVWLAR

SEQ ID NO: 51737 - protein, 143 aa, Populus tremula
MISPSFISPLFTLAVVLTVTITPLISASGGFCQEKMATLGGVHDSQSSQNSAEIDGLARFAVDEHNKKENAILEFARVVKAKEQVVAGPMHHLTIEAIEAGKKKLYEAKVWVKPWLNFKELHEFKDASDVPVFTSSDLGVKRG

SEQ ID NO: 51738 - protein, 1142 aa, Oryza sativa (japonica cultivar-group)
MRKAAAAAVAAAAAVGVALLVRRQLREAKRWGRADAVLRELEERCAAPPGRLRQVADAMAVEMHAGLASEGGSKLKMIISYVDALPSGEEKGVFYALDLGGTNFRVLRVQLGGKEGRVIKQEHDEISIPPHLMTGGSNELFDFIASSLAKFVASEGEDFHLAEGRQRELGFTFSFPVKQTSIASGTLINWTKGFSIDETINDTIGTLAGGRYDDNDVIAAVILGTGTNAAYVERANAIPKWHDLLPKSGDMVINMEWGNFRSSHLPLTEFDQALDAESLNPGEQVYEKLISGMYLGEIVRRVLLKMAEEASLFGDEVPPKLKIPFIIRLSLTKQIKAFISRTPYMSMMHCDRSPDLRTVGAKLKDILGVQNTSLKTRRLVVDVCDIVAKRAAHLAAAGIHGILKKLGRDVPNTDKQRTVIAVDGGLYEHYTIFAECVESTLRDMLGEDVSSTIVIKLAKDGSGIGAALLAAAHSQYLPSAARRQTNKPISERGERIKENGYVMEQQLASISVTESAEGMWRQQEDHRDGRAVSGEDATAGGGATGRRKKVAESVHVKLQASRAFFRSLFVGEQYHSVGVRTTTRICSREAVTAAAIPDEEKLRSERTRSAVAPDEEELCSECARSAAAVVLAAKRTPHPPPPQGSRPRKPAPTPAAACRPATACPPASDAAAIDRLLLARSDLAGLVSQIDELVCAALECQSVSAKGKQEIESFSCFLSDTNSSLKQWSSRLKLALQASPEKSKNESKFTSAACSVPATIGNDRLLCSNIDEPDLVVSPSPLVSWRAGACMVDSGKQLFLLTPLTKTKTCSSRCPKSSTTQLKTTTGLDQLNLPNIPVLKLTISDDDCLDLEQSAKANESNTCVMTPNFIKAKKGSSGNSLFSPFSFTVQKSGRALPSPCLRTALSCKQQMFSPISEGSRKEEIPSTGPTQSGKPSEASGDISSDEISKDLASRYPDFYGFNQPTMTTYRRREADDTLDWFLSPLKTCVLMDPSDEKPIAPPARDSKSFIDTPCKGLESDNLQKIKELSDDKPIQTSSVHSKALLGTPWKGLESNILKKGQGISDDKPIQTPAIHSRALLGTPWKGLESTNLKGKQAGETTLKRELWTRFEAVSTNELHFDSSVFQRSDGRRFIDILEEEAS

SEQ ID NO: 51739 - protein, 441 aa, Xanthomonas campestris pv. campestris str. ATCC 33913
MPVLAPRDSRLPVTVLSGFLGAGKTTLLNRILHNREGLRVAVIVNDMSEINIDAQLLREGGAALRRTDETLVEFSNGCICCTLRDDLLQEVKRLASERRYDYLLIESTGIAEPMPVAATFAVRDADGFSLSDIARLDTMVTVVDGSRFLEDFGSAATLAELGQQAGPDDTRGLVQLLGDQVEFADVLVISKCDQIDTPRLHRLHAVLRALNRDAAIVDAAHGEVPLRQLLDTGRFDFTRAQLAPGWMQELRGQHTPETEEYGITSFVYRARRPFHPQRFARMVQGGLPQVIRSKGFFWLASRMDWVGELSSVGGATQTNAAGFWFAARHRVDAHAIGEPLQTSITPLPYTDIGWQRQQTQCWTAPLPQLHEVGDASEYAAMQRLWHPLWGDRRQELAVIGVDMDAPRTRAALDACLLSDHELRQGPAQWQLLDDPFPHWQR

SEQ ID NO: 51740 - protein, 148 aa, Bacillus cereus G9241
MEKTFLMVKPDGVQRAFIGEIVARFEKKGFQLVGAKLMQVTPEIAGQHYAEHTEKPFFGELVDFITSGPVFAMVWQGEGVVDTARNMMGKTRPHEAAPGTIRGDFGVTVAKNIIHGSDSLESAEREIAIFFKEEELVDYSKLMNEWIY

SEQ ID NO: 51741 - protein, 557 aa, Rhodopseudomonas palustris CGA009
MTKRRFRAAAVQTLAKLGDFDFNIALATRYVEDAARQGAELIVFPECMDTGYLFDSPEHCRELAETLTDGPFVKALAALSRKHGVYIASGITEWDPAKEKIFNTGIMFDRKGEVACHYHKQFLATHDQNWFAFGERGCPVVETDLGKIGLLICFDGRIPEIFRAMTMQGAEVIVDMANFFAMDQADMWGPARSYENGVWLVAATKAGYERSIYYPGGSMIVDPKGRVLSKVPYETHGLSIATIDLDAAADKSIYTANDKIADRRPETYGIMALPYEKTPVYGVADRPLIPSKSVTKVAAVQIHVTPDCSVAEVLDMVDHTAKLGAKVITLPEYAFSAQYILTPAEATAAADQAAANLASVAKISARYGCLIAAPIVERAAAGLYVTTVLIGSDGKEIGRYRKTHLTAEERKWAVAGFDYPVFDTPFGRIGVMSGYDAVFPETSRCLAIGAADIILWPAALREPFERELLAVPRAEDNRVAVVLANRVDSPYPGGSVVIPPTGFPQWDINIAAPRVMKLGAVMPKHIDLAVCRQKMMIPKVDMFANRLVETYAPIVAA

SEQ ID NO: 51742 - protein, 143 aa, Populus tremula
MISPSFISPLFTLAVVLTVTITPLISASGGFCQEKMTTLGGVHDSQSSQNSAEIDGLARLAVDEHNKKENAILEFARVVKAKEQVVAGTMHHLTIEAIEAGKKRLYEAKVWVKPWLNFKELHEFKDAGDVPVFTSSDLGVKRG

SEQ ID NO: 51743 - protein, 473 aa, Arabidopsis thaliana
  misc_feature (325)..(325): Xaa can be any naturally occurring amino acid
  unsure (1)..(473): unsure at all Xaa locations
MAIWFARSKTLVSSLRHNLNLSTILIKRDYSHRPIFYTTSQLSSTAYLSPFGSLRHESTAVETQADHLVQQIDEVDAQELDFPGGKVGYTSEMKFIPESSSRRIPCYRVLDEDGRIIPDSDFIPVSEKLAVRMYEQMATLQVMDHIFYEAQRQGRISFYLTSVGEEAINIASAAALSPDDVVLPQYREPGVLLWRGFTLEEFANQCFGNKADYGKGRQMPIHYGSNRLNYFTISSPIATQLPQAAGVGYSLKMDKKNACTVTFIGDGGTSEGDFHAGLNFAAVMEAPVVFICRNNGWAISTHISEQFRSDGIVVKGQAYGIPKHXRVDGNDALAVYSAVRSAREMAVTEQRPVLIEMMTYRVGHHSTSDDSTKYRAADEIQYWKMSRNPVNRFRKWVEDNGWWSEEDESKLRSNARKQLLQAIQAAEKWEKQPLTELFNDVYDVKPKNLEEQELGLKELVKKQPQDYPPGFHV

SEQ ID NO: 51744 - protein, 152 aa, Lycianthes lycioides
YKDAWDTSVAVEVKIGDSIEIVRFFHCYKRGVDRVFVDHPMFLEKVWGKTGSKIYGPKAGKDYLDNELRFSLLCQAALEAPRVLNLNCSKYFSGPYGEDALFIANDWHTALIPCYLKSMYQSRGIYVNAKVAFCIHNITYQGRFAFSDFSLL

SEQ ID NO: 51745 - protein, 537 aa, Lycopersicon esculentum
MVSSLLLPTPQILSISSSLQSSLPFKPHNFLQITRKKNTLISSPLRVAAPPTTTTATEEEEKLDSKSSDIEDTENDEQDSSSKFSWRDHWYPVSLVEDLDPSLPTPFQLLNRDIVIWFDKSGSQWVALDDKCPHRLAPLSEGRLDENGDLQCSYHGWSFNGCGSCTRIPQAASQGPEAKAFQSPRACATRFPTMVSQGLLFVWPDENGWERAQATKPPMLPEDFDKPEFATVTIQRDLFYGYDTLMENVSDPSHIDFAHHKVTGRRDRAKPLPFKMEASGPWGFAGANNDKPKITAKFVAPCYSMNKIEIDTKLPIVGDQKWVIWICSFNVPMAPGKTRSIVCSARNFSQFTVPGPAWWQVFPRWQEHWTSNKVYDGDMIVLQGQEKVFLSKSKENGTDVNKEYTKLTFTPTQADRFVLAFRNWLRRHGNSQPEWFGSTDNQPLPSTVLSKRQMMDRFEQHTLKCSSCKKAYYTFEKLQKLLIGSVVVCCASAGIPADVNLRIILGSLAIISAGLAYILHELQKNFIFVDYVHAEID

SEQ ID NO: 51746 - protein, 143 aa, Populus tremula
MISPSFISPLFTLAVVLTVTITPLISASGGFCQEKMTTLGGVHDSQSSQNSAEIDGLARFAVDEHNKKENAILEFARVVKAKEQVVAGTMHHLTIEAIEAGKKKLYEAKVWVKPWLNFKELHEFKDAGDVPVFTSSDLGVKRG

SEQ ID NO: 51747 - protein, 377 aa, Chlamydia trachomatis D/UW-3/CX
MKEALSIDFITNDFLGFSRSDSLVHAVEARYRLYCRDKPHAQLGYGGSRAILGSSSLLDGVEHQIAHFHGAPEALILPSGFVANTAICAHLSSVADYVLWDEQVHISVSYNLSVFLSGWHQSFRHNDLDHLESLLESCQQRGFQRVFILVCSVYSFKGSFALLEQIVALSHQYHAQLIVDEAHAVGLFGDAGKGFCASLGYENFYSVLVTFSKALGSAGAAWLSSRDRKQDLIKEPMVSLSTGIPPYLLVSIQVAYEFLSQEGELARTRLRRIRDYFAQKISWAAAGFVQPLSLPGISEQELYQKLVATGIRVGVACPPTGKVLRANLHAFNTEQEVDILVSLLATEQVTYQKNVVTGSTSTMQRTLEDNFAAANAS

SEQ ID NO: 51748 - protein, 152 aa, Lycianthes rantonnei
YKDAWDTSIAVEVKVGDSIEIVRFFHCYKRGVDRVFVDHPMFLEKVWGKTGSKIYGPKAGKDYLDNELRFSLLCQAALEAPRVLNLNCSKYFSGPYGEDVLFIANDWHTALIPCYLKSMYQSRGIYVNAKVAFCIHNIAYQGRFAFSDFSLL

SEQ ID NO: 51749 - protein, 155 aa, Lycianthes heteroclita
YDQYKDAWDTSVVVEVKVGDSIEIVRFFHCYKRGVDRVFVDHPMSLDKVWGKTGSKIYGPKAGQDYLDNELRFCLLCLAALEAPRVLNLNCSKYFSGPYGEDVIFIANDWHTALIPCYLKSMYQSKGLYVNAKVAFCIHNIAYQGRFAFSDFSLL

SEQ ID NO: 51750 - protein, 423 aa, Magnetospirillum magnetotacticum MS-1
MMSSTDLDAVMTELGERARAASRILALTPSAAKDKALRAAAQAIRIDAKLILAANAQDMEAGTAKGLSASMLDRLMLNSARIEAMAKGLEDIARLPDPVGRSLAEWTRPNGIHISRVAVPLGVIGIIYESRPNVTADAAALCLKSGNATILRGGSESFHSSQAILRALKGGFTACGLPADAVQMVPTTDREAVGVMLRLSDYIDVIVPRGGKSLVERVVAESRIPLFQHLEGICHTYVDGSADLEMAKAVVLNAKMRRTGICGATETLLVDAACAKTHLAPLVAMLIDAGCEVRGDQQAMQADGRVLPAAEADWSTEYLDAIISVKVVDGVKAAVDHINTYGSHHTEAILAEDAGAAEAFLNGCDSAIVLWNASTQFADGGEFGMGAEIGISTGKMHARGPVGVEQLCTFKYVVRGSGQVRPG

SEQ ID NO: 51751 - protein, 163 aa, Brassica napus
  misc_feature (162)..(162): Xaa can be any naturally occurring amino acid
  unsure (1)..(163): unsure at all Xaa locations
MDKRWSLQGMTALVTGGAAGIGYAIVEELASFGAKVHVCDISETLLSQSLSEWEKKGFKVSGSVCDVTSRPERETLIQKVSSLFDGKLNILVNNVGVLRGKPTTEYGADDFAFHISTNLESAYHFCQLSHPLLKASGYGSIVFMSSVSGAVSINGASIYSLXK

SEQ ID NO: 51752 - protein, 154 aa, Lycianthes glandulosa
  misc_feature (10)..(10): Xaa can be any naturally occurring amino acid
  unsure (1)..(154): unsure at all Xaa locations
DQYKDAWDTXVVVEVKVGDSIEIVHFFHCYKRGVDRVFVDHPMFLEKVWGKTGSKIYGPKAGQDYLDNELRFSLLCLAALEAPRVLNLNCSKYFSGPYGEDVLFIANDWHTALIPCYLKSMYQSKGLYVNAKVAFCIHNIAYQGRFAFSDFSLL

SEQ ID NO: 51753 - protein, 208 aa, Oryza sativa
MVTAAAARRRPSLGRQKIEIRRIESEEARQVCFSKRRAGFFKKASELSILCSADVAAVVFSPAGKAYSFGHPSVEFLLDRFLSSSLPATAGKEEGSSVSVVAELNRQYGELRAMVDAHKARRERAEKTMEKQRQRQPAAWMDPEAEVGRMAPEELMALGTKLVAVQGGVAARADQMLRDALLLGRRPNTTTTTTTRAPPGFFHLHPHF

SEQ ID NO: 51754 - protein, 417 aa, ASPERGILLUS NIDULANS FGSC A4
MVTVLILAHFSLLLALLALLVLMVLIHTAHILRPNLDTLLLDLLGLPLEGQYPPPPHSPQPPPQHPQHFQPPPGPPGPPGPPHGYGQGFGAPPMPAPSMPSLGYAPGQVAPGDFRREADALRKAMKGFGTDEKALIQVLSKLDPLQVAAVRATYSSHIRRDLYSDIKSETSSYFRQGLLAIVDGPLMHDTASAREAVQGIGTKEWLLNDVLLGRSNADLNAIKLSYERTYRRSLERDVEGDLSFKTKSLFAHVLRAARHEENAPIDYRTIESEAQNIHGATAARMVNNADEVCSIFARSSNNELRALSQAFSARYHTSLEAHIEKEFSGHMKDALLHMLRTALDPAMRDAVNLEECMRGMGTKDERLVVRVVRVHWDRQHLENVKRAYQHKYKQDLVKRVRGETSGDYQRLLVAMLE

SEQ ID NO: 51755 - protein, 399 aa, Burkholderia fungorum LB400
MFDHIPAYPGDPILGLNEDFQLDPRTNKVNLSIGIYFDDAGKLPVMNAVRRAETALLDSIGPRSYLPMAGLPLYRDAAQALVFGADSEARKAGRIATLQTIGGSGALKVGADFLKRYFPGSQVWISDPSWENHRVVFEGAGLTVNTYPYYDAQTGGLRFAEMLDAIGRLPEQSVVLLHACCHNPTGVDLSPAQWAGLVPVLQRRKLIAFVDMAYQGFGAGLEEDAACVRLLADAGIPLIAANSFSKNFSLYGERVGALSVVCKSAEEAGRVLGQLMSTVRANYSNPPTHGARLVANVLADASLRASWEAELATMRERILAMRGTIHAGLAGRVDEVMRARYVAQRGMFTYTGLSESQVERLRSEHAVYVLRSGRMCVAGLNARNAEYVAASIAAVVSGA

SEQ ID NO: 51756 - protein, 245 aa, Phalaenopsis amabilis
MGRGRVQLKRIENKINQQVTFSKRRSGLLKKAHEISVLCDADVALIIFSNKGKLCEYSTDSSMEKILERYEHYSYTERALYSNEDNPQADWRLEYNKMKAKVESLQKSQRHLMGEQLDYLSIKELQHLEQQLESSLKHIRSRKTQLMVDSISELQKKEKLLLEQNKTLQDMAKAKAKALVQNAAWEQQNKSQYSSEPPHAVISDSVPTPTSRTFQTRANGEESPQPQLRLGNSLLPPWMLSHVNG

SEQ ID NO: 51757 - protein, 250 aa, Phalaenopsis amabilis
MGRGKVQLKRIENKINRQVTFSKRRSGLLKKAHEISVPCDAEVALVIFSAKGKLYGYSTDSCMDRILDRYERYCYAEKALQITEPESQGDICNEYGKLKNKIEALQKSRSHLMGEQLDSLSIKELQHLEQQLETALNHIRTQRIQLLLNCITEFQRKEKSLLEHNSLLEAKLCSFQLDPQITETATQNPNRKQQKQDQVNSSPSPFLPPNHLPTLNLGTYPASDGEEAEDPTLLQMNSISLPPWMLRSST

SEQ ID NO: 51758 - protein, 198 aa, Triticum aestivum
  misc_feature (39)..(39): Xaa can be any naturally occurring amino acid
  unsure (1)..(198): unsure at all Xaa locations
ILWHDCPIGQTERQKLLGPKGCFIWITGLSGSGKSTLPXCTDRGLHYRGHHTYVLNGDNLRHGLNRDLSFKAEDRRENIRRVGEVAKLFADAGTICIASLISPYRRDRDACRALLPDSRFIEVFMDLPLELCEARDPKGLYKLARTGKIKGFTGVDDPYESPVNSEIVIKMEGGECPSPKAMAQQVLSYLEKNGYLQA

SEQ ID NO: 51759 - protein, 338 aa, Salmonella enterica subsp. enterica serovar Paratyphi A str.
MRVLVTGGSGYIGSHTCVQLLQNGHDVVILDNLCNSKRSVLPVIERLGGKHPTFVEGDIRNEALITEILHDHAIDTVIHFAGLKAVGESVARPLEYYDNNVNGTLRLVSAMRAANVKNLIFSSSATVYGDQPKIPYVESFPTGTPQGPYGKSKLMVEQILTDLQKAQPEWSIALLRYFNPAGAHPSGDMGEDPQGIPNNLMPYIAQVAVGRRESLAVFGNDYPTEDGTGVRDYIHVMDLADGHVVAMEKLADKSGVHIYNLGAGVGSSVLDVVNAFSKACGKPINYHFAPRRDGDLPAYWADASKADRELNWRVTRTLDEMAQDTWHWQSRHPQGYPD

SEQ ID NO: 51760 - protein, 250 aa, Salmonella enterica subsp. enterica serovar Paratyphi A str.
MAVTKLVLVRHGESQWNKENRFTGWYDVDLSEKGVSEAKAAGKLLKEEGFSFDFAYTSVLKRAIHTLWNVLDELDQAWLPVEKSWKLNERHYGALQGLNKAETAEKYGDEQVKQWRRGFAVTPPELTKDDERYPGHDPRYAKLSEKELPLTESLALTIDRVIPYWTDTILPRMKSGERVIIAAHGNSLRALVKYLDNMSEDEILELNIPTGVPLVYEFDENFKPLKHYYLGNADEIAAKAAAVANQGKAK

SEQ ID NO: 51761 - protein, 362 aa, Zea mays
MGLDVGEIGMGLDLGLDLRLFAARSAGGMAKGAAPAGIQSCIRSLEVERRKIEVFRRELPLCLRLLADVIDELKEEAAKRGEYDDGAATVDDGDKRKWMSTAQLWVDSDAKSDESDKEQQSEITSPPEPKLLGGGAPTPIRAAVSAVAVPQPLPPPLFRREDSSASSGLSLVSLSPATKAAVPISPPVVAASGTGTASARFCGTTMPPCGSEVNNMHSQAQQQQQASRKARRCWSPELHRRFVAALHELGGPQVATPKQIREVMQVDGLTNDEVKSHLQKYRLHNRRSSPGAAAAPVSQSIMLVDGVWAAQEQSSGSQSGSRQGPLQFSRAGMAVGGGDDSSSSDDDEDDDKSEDGYSLKCV

SEQ ID NO: 51762 - protein, 389 aa, Geobacillus kaustophilus HTA426
MSRNCAFVYSEQFLQYKFHDDHPFNQLRVKMTYDLLCTLGALEDRQIVAPRMATDDELALIHDRSYIEAVKAAGRGELSEAAAQNYGLGTEDTPIFPNMHEASALLVGSTLTAVDAVLSGAAEHALNLGGGLHHGFRGKASGFCVYNDSAVAIQYIREKYGLRVLYVDTDAHHGDGVQWAFYDDPNVCTFSIHETGRYLFPGTGNVNERGLGAGYGYSFNIPVDAFTEDESWIAAYTTALREIADFFRPDVIVTQNGVDAHYYDPLTHLSVTMKTYRAIPKLAHEIAHEYCGGRWIAVGGGGYDIWRVVPRAWALLWLEMTGQADVSGPLPDEWRERWQPLSPVALPLEWDDPDDLYPPIPRKAEISEKNAQTVEKALYFIRSQRRAGT

SEQ ID NO: 51763 - protein, 143 aa, Populus tremula
MISPSFISPLFTLAVVLTVTITPLISASGGFCQEKMATLGGVHDSQTSQNSAEIDGLARFAVDEHNKKENAILEFARVVKAKEQVVAGTMHHLTIEAIEAGKKKLYEAKVWVKPWLNFKELHEFKDASDVPVFTSSDLGVKRG

SEQ ID NO: 51764 - protein, 373 aa, Gossypium hirsutum
MEYRNVFPIFVIFSFFIVGVICTETFSAEGFEVDPLIEQVTDGHEGAEPQLLTAEHHYSLFKKRFKKSYGSQKEHDYRFKIFQVNLRRAARHQNLDPSATHGVTQFSDLTPGEFRKAYLGLRRLRLPKDATEAPILPTDNLPQDFDWREKGAVTPVKNQGSCGSCWSFSTTGALEGANFLATGKLVSLSEQQLVDCDHECDPEEAGSCDSGCNGGLMNSAFEYTLKAGGLMREEDYPYTGTDRGTCKFDNTKVAAKVANFSVVSLDEDQIAANLFKNGPLAVAINAVFMQTYIGGVSCPYICSKRLDHGVLLVGYGSAGYAPVRMKDKPYWIIKNSWGENWGENGFYRICRGRNICGVDSMVSTVAAVNTNSE

SEQ ID NO: 51765 - protein, 143 aa, Populus tremula
MISPSFISPLFTLAVVLTVTITPLISASGGFCQEKMATLGGVHDSQSSQNSAEIDGLARFAVDEHNKKENAILEFARVVKAKEQVFAGTMHHLTIEAIEAGKKKLYEAKVWVKPWLNFKELHEFKDASDVPVFTSSDLGVKRG

SEQ ID NO: 51766 - protein, 472 aa, Burkholderia mallei ATCC 23344
MSRLIVVSNRVAAGQDARPTAGGLAVGVLDALKETGGVWFGWNGEIAGAPEEPVIERDGNVTYATVGLTRRDYDQYYRGFSNATLWPVFHYRGDLARFDRQEYAGYLRVNCALAKQLCALVQPDDIIWVHDYHLLPFAHCLRELGVKNPIGFFLHIPFPSPEVLRTVPPHEELMKFMCAYDVIGLQTESDKQAFVDYIERRGLGTSSEDGILHAHGRVVKVAAYPIGIYPDAIGKAAIEYGSRKAVKALRDTMRERKLVISVDRLDYSKGLVERFQAFERMLANAPGWQGRVSLVQIAPPTRSDVQTYQRIRQTLEGEAGRINGRFAQLDWTPIQYLNRKYERNLLMALFRLSQVGYVTPLRDGMNLVAKEYVASQDPNDPGVLVLSEFAGAAAELPGALLVNPFDLSQMAESLERALAMPLEERQARHAENIARLRKNDLSVWRDSFLTDLRSVATAASVTQRAGRRVANA

SEQ ID NO: 51767 - protein, 471 aa, Vibrio vulnificus YJ016
MAMKLVWLRRDLRCVDNTALNHAIATSQEVVACFVATPLQWRDHHMAPMQADLIARRLAVLAEELNALNIPLLYDEVDDYAQSATRVANWAEQLAVSEVVLNREYEVNERVRDEQLVNRLASSEMGVLDVEDKCVQAPGCVLNKQGDYFKVFTPFKKAWLKSFIPPQIIKTSAAQPVVLPEALQSSLWHEQAPFSYPRQSSEAWSVDSQQIRETLRRFCHEEVDRYHEQRDFPATAGTSVLSPYLAIGAISVRQCIARLYWQQSYLSNGREVWLSELIWREFYHHLIHFEPKLVKGQGFVEWEKHLLWPAKPDWFERWCRGETGYPIVDAAMRQLNQTGWMHNRLRMIVASFLTKDLHVNWRLGEQYFMQKLVDGDFAANNGGWQWCASTGCDGQPYFRIFNPITQGEKFDPNGEFVKHWLPELAEVPSKFVHQPWKWLGHMRLDYPAPMVDHKQEREITLSLYTQAKDCL

SEQ ID NO: 51768 - protein, 605 aa, Methylococcus capsulatus str. Bath
MCGIAGLVLKGRNVQADRLHPMIERLAHRGPDGQGVFTEGGFGLAHTRLSIIDLSGGRQPILADDGRLAVVANGEIYNHVELREALEREGRRFATHSDSETILHAYALDPEGFAGRLHGMFAFALYDGVRRRLVLGRDRLGIKPLFYAALPDRLVFASEMKAILPLLPNAPTIDAGAFSQFLHTHCSTGEETLFSGIRRLGPGEILEADAELNLRKRRYWTPLGVRSRALDFAEAEAEFEGMFEQVMKEHVRSDVPYGLFLSGGNDSAILLAMLSRLQAQPVRTFSIGYVDAAMKDELGDAERIAQVFGSRHTSIRLRREDLFRRIPHTVWAADDLMRDYASFPTSALSEAAAKELKVVFTGEGGDEVFGGYRRYRQPRLAWLARNLLAPGTGGFRTRSEWWRKRSQRLFGPALAAERKHFRAPYLKAWSEAPAVWSHLQHCQYTDLVTDLPDSLLVKVDRMMMGFGLEGRVPFLDHRVVEFGLGLPDALKTDGKRPKVFLRRWAERHVPKEHLYTKKRGFTVPVREWLGGELLDRLEGKLSGNAAVREWFDTRHFPALFQAQRKKGNASREIFCLMQFAIWHRLFIDQPGLKPSPDEDPLDWIS

SEQ ID NO: 51769 - protein, 265 aa, Capsicum chinense
QRLIFAGKQLEDGRTLADYNIQKESTLHLVLRLRGGMQIFVKTLTGKTITLEVESSDTIDNVKAKIQDKEGIPPDQQRLIFAGKQLEDGRTLADYNIQKESTLHLVLRLRGGMQIFVKTLTGKTITLEVESSDTIDNVKAKIQDKEGIPPDQQRLIFAGKQLEDGRTLADYNIQKESTLHLVLRLRGGMQIFVKTLTGKTITLEVESSDTIDNVKTKIQDKEGIPPDQQRLIFAGKQLEDGRTLADYNIQKESTLHLVLRLRGGF

SEQ ID NO: 51770 - protein, 319 aa, Bacillus cereus ATCC 14579
MYEMIPVTILTGFLGSGKTTLLNRILSENHGKKLAVIVNEIGQIGIDNQLIMNVEEEIMEMTNGCLCCTVREDLLVALKQLLDVKAEGKMDFDGLVIETTGLANPGPIIQTFFLDPVIQSAYQINGVVTVVDSYHIHKHFEKGLEAKEQIAFADVVLVNKLDLIEENEKENLLHEIQGINPTAKLIEATNCEVDIPSLLQIQTFKTKDTLQIYPHKEHNHLEGVKSFVLREERPLDLQKLNEWMSAVVQELGEYLYRYKGILSIDGVDKRIVFQGVHTLFAASYDREWQEGEERVSEVVFIGRDINKEWFQEHFEECVK

SEQ ID NO: 51771 - protein, 445 aa, Arabidopsis thaliana
MASNGVTNCNANANVWRFKGNGATSDAAAVTLRKLAFGMFKNCTMNSGKTILFPTPGEPSAHSNFRTCPEAEEAVADAARSGMANSYAPSPGVFKARRAVAEYLNGELPTKLKAEDVYITGGCNQAIEIVIDSLAGNPSANILLPRPGYPHYDARAVYSGLEIRKYDLLPESDWEINLDGLEAAADENTVAMVIINPNNPCGNVYTYDHLNKVAEMARKLGIMIISDEVYDHVVYGDKPFIPMGKFASIAPVITLGSISKGWVNPGWRVGWIAMNDPNGIFVSTGVVQAIEDFLDLTPQPSFILQEALPDILEKTPKEFFEKKIKAMRRNVELSCERLKDIPCLFCPKKPESCSYLWLKLDTSMLNNIKNDFDFCTKLVSEESLILIPGVALGAENWVRISIGTDESVVQEIFDRLKGFYDRHAISKEAIKLSGHAINQIVVSVN

SEQ ID NO: 51772 - protein, 143 aa, Populus tremula
MISPSFISPLFTLAVVLTVTITPLISASGGFCQEKMATLGGVHDSQSSQNSAEIDGLARFAVDEHNKKENAILEFARVVKAKEQVVAGTMHHLTIEAIEAGKKKLYEAKVWVKPWLNFKELHEFKDASDVPVFTSSDLGVKRG

SEQ ID NO: 51773 - protein, 341 aa, Oryza sativa (japonica cultivar-group); identical to SEQ ID NO: 1005

SEQ ID NO: 51774 - protein, 267 aa, Xanthomonas campestris pv. campestris str. ATCC 33913
MTVPAFGLGTFRLKDQVVIDSVRNALALGYRAIDTAQIYDNEAQVGQAIADAGVPRDQLFVTTKIWVDRFSRDTLQPSLQESLRKLGTDYVDLTLIHWPSPKDQVPMREYLEALADAKAQGLTRAIGVSNFTIALTRQAIEILGADAIATNQIEVHPYLQNRTLIAFLREQGIHVTSYMTLAVGEVLKDPVIQAIARRHDATPAQVTLAWALQQGYSVIPSSTKRANLESNLKAQSLHLSEQDMAEIAALDRGERLANPKAIAPDWD

SEQ ID NO: 51775 - protein, 305 aa, Oryza sativa
MATHFTLNTGARIPSVGLGTYKAGTGVVADVVSAAVKAGYRHIDCAPLYKNEQEVIGGALKKLFDDGVVKREDLFITSKIWCSDLAPEDVPLAMDSTLKDLQLDYVDLYLIHWPFQIKKGTELSPENFVKPDIPSTWRAMEQLYDSGKARAIGVSNFSSKKLGDLLCVARVPPAVDQVECHPGWQQAKLRAFCHTSGVHLSAYAPLGRMKGIAVDSVLPSVAEMLGRTPAQVALRWGLQQGQSVLPKSVSEARLKENMDLFGWSIPEELCAKLSEIEQVKQIRGDGFAHPESVYKTYEELFDGEI

SEQ ID NO: 51776 - protein, 325 aa, GIBBERELLA ZEAE PH-1
MENYQKLEKIGEGTYGVVYKARDLANGGRIVALKKIRLEAEDEGVPSTAIREISLLKEMRDPNIVRLFNIVHSDGHKLYLVFEFLDLDLKKYMESLPISDGGRGKALPEGSSPHLQHLGLGDTVVRKFMYQLCDGVKYCHSHRVLHRDLKPQNLLIDKDGNLKLADFGLARAFGVPLRTYTHEVVTLWYRAPEILLGGRQYSTGVDMWSVGCIFAEMCTRKPLFPGDSEIDEIFKIFRTLGTPSEDNWPGVTSYPDFKASFPKWQRDYSKSLCSTLDDHGLELLEMMLVYDPAGRISAKGAFNHPYFEPHLAQKQASAQTNGYYH

SEQ ID NO: 51777 - protein, 272 aa, Staphylococcus aureus subsp. aureus MRSA252
MKRLENKVAVVTGASTGIGQASAIALAQEGAYVLAVDIAEAVSETVDKIKSNGDKAKAYIVDIASEQQIDNFASEIREQIGHVDVLFNNAGVDNAAGRIHEYPTDVYDKIMNVDMRGTFLMTKMMLPLMMTKGGSIVNTSSFSGQAADLYRSGYNAAKGAVINFTKSIAIEYGRDGIRANAIAPGTIETPLVDKLTGTSEDKEGKAFRENQKWMTPLGRLGKPEEVGKLVVFLASDESSFITGETIRIDGGVMAYTWPGEMLSDDSWKRTLE

SEQ ID NO: 51778 - protein, 335 aa, Chlamydophila abortus S26/3
MKVVINGFGRIGRLVLRQFLKRNSSIEVVAVNDLVPGEALTYLFKYDSTHGRFPAEVSHENGCLVVDGRRIQLLAQSDVQKLPWKDLGVDIVIESTGLFTKKEDAEKHLASGAKRVLITAPAKGDVPTFVMGVNEHKFDPEKDLIISNASCTTNCLAPLAKVLLDSFGIEEGLMTTVHAATATQSVVDGPSKKDWRGGRGAFQNIIPASTGAAKAVALCLPELKNKLTGMAFRVPVADVSVVDLTVRLQKSTSYEEICKVVKEASEAHLSGILGYTDQEVVSSDFIGCEYSSIFDAGAGIALTDRFFKLVAWYDNEIGYATRIVDLLEYVAKNSK

SEQ ID NO: 51779 - protein, 487 aa, Pseudomonas aeruginosa UCBPP-PA14
MTDLNTSQGQQLRRVLKPRHLNMIAIGGSIGTGLFVASGATVATAGPGGALLSYALIGLMVYFLMTSLGEMAAYMPVSGSFCTYGSRFVEDGFGFALGWNYWYNWAVTIAAELVAAQLVMSFWFPEVPGIYWSAIFLGIMFGLNVISARGFGESEFWFALIKVVTVVIFIGVGLATIFGIMHGVESPGFSNFTMGDAPFVGGFQAMVGVAMIAGFSFQGTELIGIAAGESENPRKNIPIAIRQVFWRILMFYILAIFVIGMLIPYTDPNLLKNDASDISVSPFTLLFERAGFAAAAGVMNAVILSAILSAGNSGMYASTRMLYNLALEGKAPRLFSRVSRSGVPRNALYATTLVGALCFLTSAFGDSTVYTWLLNTSGMCGFIAWLGIAISHYRFRKGYLAQGGRLEDLPYRAKLFPFGPLFAFALCMVITLGQNYQALVGERIDWIGLLATYISLPLFLAIWLGYRWKKRARFVRYHEMDVSPTNT

SEQ ID NO: 51780 - protein, 430 aa, Methylococcus capsulatus str. Bath
MTAVSALRPAGPEAVAAYVDGLARRAREVGRILSRAETAAKNRALLAIAAALEESADALIEENRKDLEAGAAKGLDRAQLERLGVDAKRVQTMAVGLREIAALPDPVGEISGLTYRPSGIQVGRMRVPLGVIGIIYESRPNVTADAAGLCLKSGNACILRGGSEAIHSNRAIAACIRRGLEAGGLPADAVQLIETTDRAAVGALLAADEYVDIIVPRGGRSLIERVVAESRIPVIKHLDGICHVYIDDGADLAKARRIAINAKTQRYGVCNAMETLLVAAGIAPAVLPDLAALYRDKGVELRGCPETCRLVPDCVPATEADWDTEYLAPILAVRVVAGLDEAIEHIHRHGSGHTDAIVTEDYGRARRFLREVDSASVMVNASTRFADGFEYGLGAEIGISTDKLHARGPVGLEGLTTQKFIVLGDGHVRI

SEQ ID NO: 51781 - protein, 270 aa, GIBBERELLA ZEAE PH-1
MDVPGFALITGGASGIGRACARAFARDGSAGIALIDLNLEALQAVKSEIEQEKLSPNNNFRIELYPADVTDETRINEIVNDMVQKFGRIDYVVNAAGIAIKHQGGAAFAQTADWNRVLNINLNGTFFVLRAAARVMLKQDPIKSSINGRDLQRGSIINFSSIQGVVGIPLSTSYTAAKHAIIGLTRSASEDYAKDGLRINAICPGYTETPMTTKNPDVLKAMQERISTAVPMHRMGQPEEIADGVLYLAGGRSSFVTGSALAVDGGYTQR

SEQ ID NO: 51782 - protein, 103 aa, ASPERGILLUS NIDULANS FGSC A4
MSLLRNVKNLAPLLDRVLVQRVKPEAKTASGIFLPESSVKEQNEAKVLAVGPGAVDRNGQRIPMGVAAGDRVLVPQFGGSPLKIGEEEYHLFRDSEILAKINE

SEQ ID NO: 51783 - protein, 242 aa, GIBBERELLA ZEAE PH-1
MTSFDGKVIAVTGAASGMGLATAQLLASRGAIISLADINEEVLKSVLDSLPGNGHIYQVVDVSQSESVNAWIKQTIDKFGKLDGAVNMAGIIAEPTPLTEYTDEVWDRMFAVNTRGVFNCLRAELKTITAGGSIVSAASVFGQFGAPGHVAYCASKAAVIGLSRTAAKENEHIRVNCVSPGSVSTAMNQHDDPEHVKRSLAGTVQKRRAEPIEVARVIAFLLSDEASFVTGAVYNVDGGWVC

SEQ ID NO: 51784 - protein, 221 aa, Arabidopsis thaliana
MASLISDIEPPTSTTSDLVRRKKRSSASSAASSRSSASSVSGEIHARWRSEKQQRIYSAKLFQALQQVRLNSSASTSSSPTAQKRGKAVREAADRALAVSARGRTLWSRAILANRIKLKFRKQRRPRATMAIPAMTTVVSSSSNRSRKRRVSVLRLNKKSIPDVNRKVRVLGRLVPGCGKQSVPVILEEATDYIQALEMQVRAMNSLVQLLSSYGSAPPPI

SEQ ID NO: 51785 - protein, 408 aa, Frankia sp. CcI3
MTTPPRQVVVTGLGATTPLGGDVASTWEGLLSGRSGVRRLTEGWVEQLPVHIAAPLAVEPPLGRVEARTLDRSQQMALTAAREAWADAGSPEVDQERLAACVASGIGGVLTLLHQHDVIREKGPRRVSPHLVPMLMPNGPASTVGLAFGAKAGVHAPVSACASGSEAIALALDIIRAGRADVVIAGGTEAAISALTMAGFAQMQALSRRNDAPEAASRPFDKARDGFVLGEGAAILILEAAEHAAARGARVHGTLAGAGISSDAYHIAAPEPTGAGAARAIRAALRSGSLEPRDVVHVNAHATSTPAGDAAEALALRSAFGDHIDEIAVTSTKSTTGHLLGAAGAVEAVFSVLALREHLVPATRNLDALDDEIALDVVRIDNRTIRPGAALSNSFGFGGHDICLAFTA

SEQ ID NO: 51786 - protein, 401 aa, Arabidopsis thaliana
MSMALLLTSPAMKQKPAVITSPRRGSSPSRRLRVSCVTTNPARKKNETCNHFRPIKEVNNQLTHTIPQEKLEIFKSMENWAEQKLLPYLKPVEDSWQPQDFLPAPENDDEFYDRVKEIRERTKEIPDDYFVVLVGDMITEEALPTYQTTLNTLDGVKDETGGSLSPWAVWIRAWTAEENRHGDLLNKYLYLTGRVDMRHVEKTIQYLIGSGMDSKFENNPYNGFIYTSFQERATFISHGNTARLATTYGDVTLAKICGTIAADEKRHETAYTKIVEKLFEIDPDGSVQALASMMKKRITMPAHLMHDGRDNDLFDHYAAVAQRIGVYTAADYAGILEFLLRRWKVESLGLGLSGEGRRAQEYLCTLPQRIKRLEERANDRVKLVSKPSVSFSWVFGRDVKL

SEQ ID NO: 51787 - protein, 333 aa, Chlamydophila pneumoniae TW-183
MKGVRMAFKEVVRVAVTGGKGQIAYNFLFALAHGDVFGVDRGVDLRIYDVPGTERALSGVRMELDDGAYPLLHRLRVTTSLNDAFDGIDAAFLIGAVPRGPGMERGDLLKQNGQIFSLQGAALNTAAKRDAKIFVVGNPVNTNCWIAMKHAPRLHRKNFHAMLRLDQNRMHSMLAHRAEVPLEEVSRVVIWGNHSAKQVPDFTQARISGKPAAEVIGDRDWLENILVHSVQNRGSAVIEARGKSSAASASRALAEAARSIFCPKSDEWFSSGVCSDHNPYGIPEDLIFGFPCRMLPSGDYEIIPGLPWEPFIRNKIQISLDEIAQEKASVSSL

SEQ ID NO: 51788 - protein, 741 aa, Solanum tuberosum
MASSSSLTLSQVIFSPSLPRHGSSSSSSPSLSFSTFSGLKSTPFTSSHRRILPSTTVTKQQFSVRASAAVETLEKTDAAIVEKSVNTIRFLAIDAVEKANSGHPGLPMGCAPMGHILYDEVMKYNPKNPYWFNRDRFVLSAGHGCMLQYALLHLAGYDSVQEDDLKSFRQWGSRIPGHPENFETPGVEVTTGPLGQGIANAVGLAVAEKHLAARFNKPDAEIVDHYTYVILGDGCQMEGISNEVCSLAGHWGLGKLIAFYDDNHISIDGDTEIAFTEDVSARFESLGWHVIWVKNGNTGYDEIRAAIKEAKAVKDKPTMIKVTTTIGFGSPNKANSYSVHGSGLGAKEVEATRNNLGWPYEPFHVPEDVKSHWSRHTPEGAALETEWNAKFAEYEKKYAEEAADLKSIITGELPAGWEKALPTYTPESPADATRNLSQQNLNALAKVLPGFLGGSADLASSNMTLLKMFGDFQKNTPEERNLRFGVREHGMGAICNGIALHSLGLIPYCATFFVFTDYMRGAMRISALSEAGVIYVMTHDSIGLGEDGPTHQPIEHLASFRAMPNILMFRPADGNETAGAYKVAVLKRKTPSILALSRQKLPQLAGTSIEGAAKGGYIVSDNSSGNKPDVILIGTGSELEIAVKAAEELKKEGKTVRVVSFVCWELYDEQSAEYKESVLPSSVTARVSIEAGSTFGWQKFVGDKGKAIGIDGFGASAPADKIYKEFGITAEAVVAAAKQVS

SEQ ID NO: 51789 - protein, 234 aa, Thermus caldophilus
MRAENPVFFLDYDGTLAPIAQRPEEAFPHPEAPRVLRALMERHPVYVVTGRRVRDLEPLLPLPGLPVVGGHGLEEGVLFGEVRPLFPVDLGPLRARLPSCPGVRVEDKGFALALHYRGAEDEEKARACLEALLKAVEGLLEALGLEALPGKKVLELKPKGVDKGQAVLRLLGRHPDHTPVYIGDDTTDEAAFLALRGRGLTFKVGEGPTAAQGRLKDVEEVLAYLQTYLRPTSL

SEQ ID NO: 51790 - protein, 583 aa, Magnaporthe grisea 70-15
MCGIFACHAHPDVQKFKPTALRLAKAIRHRGPDWSGSVTCNQTILCHERLSIVGVESGAQPLTNEDESIILAVNGEIYNHRLVRKSLKTPYHFKTTSDCEVIIPLYMEHGLDAPKYLDGMFSFVLYDKKQNRTIAARDPIGVTTFYQGWSSSEPGAVYFGSELKCLYQVCDKIEAFPPGHIYDSLTGERTRYFQPTWWDPKRVPETPLDLTKLREALEKSVRKRLMAEVPYGVLLSGGLDSSLVASIAQRETKRLKKLAIEAGLEDLPAEPTGNHDQGEGLVGIDDENKLSTMTYLPQLNSFSIGLPGSPDNKAALEVAKFLGTKHHVMTFTIEDGLNALSDVIYHLESYDVTTIRASTPMYLLSRKIKAMGIKMVLSGEGSDEAFGGYLYFHNAPDKDAFHDETVRRVKNLHLSDCLRANKSTSAWGLEARVPFLDKEFLELAMNIDPKEKMITKERIEKYIVRKAFDTSDDPNAEPYLPDNILWRQKEQFSDGVGYGWIDALKDNAEIQVTDEMMKNPKPEWGDDIPDTKEAYWYRCMFDEHFPPHCASTVERWTPTWSKQTDPSGRAIAVHAAKYDHISE

SEQ ID NO: 51791 - protein, 395 aa, Pseudomonas fluorescens PfO-1
MTAALMNTYQPLDLSFIKGLGTRLWDLSGREYLDAVAGVAVTNVGHSHPRIVSAISEQAGLLLHTSNLYSIDWQQSLARKLTQLAGMERAFFNNSGAEANETALKLARLYGWHKGIEQPLVVVMANAFHGRTLGTLSASDGPAVRLGFNELPGDFVKVPFGDLEALEQVQRKHGQRIVAILVEPIQGESGVQLAPPGYLKALRELCNRHAWLLMLDEIQTGIGRTGRWFAFQHEGIVPDVMTLAKGLGNGVPIGACLARGRAADLFTPGSHGSTFGGNPLACRVGCTVLEIIEEQGLLENARVQGERLLTRLRAELADNPNVLAIRGQGLMIGIELKQPIRDLTLIAARDHGLLINVTRGKTIRLLPPLTIDEREVGMIVRGVGRSLSHVSSLGQ

SEQ ID NO: 51792 - protein, 285 aa, Zea mays
  misc_feature (223)..(223): Xaa can be any naturally occurring amino acid
  unsure (1)..(285): unsure at all Xaa locations
AGPEPAAQVHPQIHTEQGKPSPHGPAEADAVGGRLAAGSFLEDLHNRVSLLCFDSVHPTAASFRAVPSLSFDHPYPPTKLQFNPRAASTPLLASSSDALRLWHAPLDDLSASAPAPELRSVLDNRKASASDFCAPLTSFDWNEIEPRRIGTASIDTTCTVWDIERGVVETQLIAHDKGVHDIAWGEAGVFASVSADGSVRVFDLRDKDHSTIVYESPRPDTPXLLRLAWNRYDLRYMAALLMDSNAVVVLDIRAPGVPVAELRRDGGCVNAVEWAPQGARHLCSA

SEQ ID NO: 51793 - protein, 640 aa, ASPERGILLUS NIDULANS FGSC A4
MSWKLTKKLKETHLAPLTQTFTRSSSTSTIKGDSGEEAQAPAQTPTISSSASSNGIAASEALVSPPVAPVKPGILIVTLHEGRSFALPQHYQQVFSSHIQNGYSMRPSSSSSHSTHSQSSSFVPSNRPQSTSSGINAAPTIHGRYSTKYLPYALLDFDKNQVFVDAVSGTPENPLWAGDNTAFKFDVSRKTDLNVQLYLRNPAARPGAGRNDDIFLGAVKVHPRFEEEIQPYIDDPKLSKKDNQKAAAAHAEQERALGQVGAEWHDLQFGSGSLKISVSFVESKHRSLKLEDFDLLKVVGKGSFGKVMQVMKKDTGRIYALKTIRKAHIISRSEVTHTLAERSVLAQINNPFIVPLKFSFQSPEKLYFVLAFVNGGELFHHLQREQRFDVNRARFYTAELLCALECLHGFKVIYRDLKPENILLDYTGHIALCDFGLCKLDMKDEDRTNTFCGTPEYLAPELLLGQGYTKTVDWWTLGVLLYEMLTGLPPFYDENTNDMYRKILQEPLTFPSSDIVPPAARDLLTRLLDRDPNRRLGANGAAEIKSHHFFANIDWRKLLQRKYEPSFRPNVADARDTKNFDAEFTSEAPKDSYVDGPMLSSTQQQQFEGWSYNRPVAGLGDAGGSVKDPSFASIPEDSRF

SEQ ID NO: 51794 - protein, 117 aa, Glycine max
DQLILVLDAAYSEQPASLMGTLSDTQTPGRKRGASGVVVEKTVERRQKRMIKNRESAARSRARRQAYTQELEIKVSRLEEENERLRRLNEMERALPSVPPPEPKPKQQLRRTSSAIF

SEQ ID NO: 51795 - protein, 213 aa, Ralstonia solanacearum
MLRIWGRLSSVNVQKVVWCARELSLDHERIDVGGAFGGLDTAEFRALNPNGMIPVIEDGISGTDGEHFVLWESNAIVRYLCARYGPGNLYPLELHERADADRWMDWQTTSFSPSMVDAFLQLVRTPEDQRDPARIERSRLATERTSAILDAVLARQPYVAGQRFTMADIACGCAAHRWLSLPLERPACPHLERWMAELRDRRAAQEVLALPLA

SEQ ID NO: 51796 - protein, 424 aa, Brassica napus
  misc_feature (396)..(396): Xaa can be any naturally occurring amino acid
  unsure (1)..(424): unsure at all Xaa locations
GRPTRPGCGRNCLGACCLNGARLPLYSCKKLENSGTGEKLVISHEAREPPVAFLESLVLGEWEDRFQRGLFRYDVTACETKVIPGKYGFVAQLNEGRHLKKRPTEFRVDKVLQSFDGNKFNFTKVGQEELLFQFEAGEDSEVQFFPCMPLDAENSPSVVAINVSPIEYGHVLLIPRVLDCLPQRIDHKSLLLALHMAAEAANPYFRLGYNSLGAFATINHLHFQAYYLAMPFPLEKAPSKKMITTASGVKISELLSYPVRSLLFEGGSSMQDLSDTVSDACVCLQNNNIPFNILIADCGRQIFLMPQCYAEKQALGEVSPELLETQVNPAVWEISGHMVLKRKEDYEGASEENAWRLLAEASLSEERFKEVNALIFEAIGCSNQEERLEGILVANXSGSVNQTSNRTLGGPITNGTASECLVLQ

SEQ ID NO: 51797 - protein, 140 aa, Zea mays
MAEQEAPVAVEAPTPVLGEPMDLMTALQLVMKKSSAHDGLVKGLREAAKAIEKHAAQLCVLAEDCDQPDYVKLVKALCAEHNVHLVTVPAAKTLGEWAGLCKIDSEGKASKVVGCSCVVVKDYGEESEGLNIVQEYVKSH

SEQ ID NO: 51798 - protein, 168 aa, Triticum aestivum
MAPTVMASSATSVDPFQGLKSTAGLPVSRRSNGASLGSVSNGGRIRCMQVWPIEGIKKCETLSYLPPLSTEALLKQVDYLIRSKWVPCLEFSKVGFIFREHNASPGYYDGRYWTMWKLPMFGCTDATQVINEVEEVNKEYPDAYVRIIGFDNMRQVQCVSFIAFKPPG

SEQ ID NO: 51799 - protein, 141 aa, Chlamydophila abortus S26/3
MEQTLSIIKPDSVGKAHIGEIIAIFEKSGFRIAAMKMLHLSVKEAEGFYAVHKSRPFFQELVDFMISGPVVVMVLEGNNAVARNREIMGATNPQEAAPGTIRAQFGESIGINAVHGSDSLENAAIEINYFFSKVEIVNSAA

SEQ ID NO: 51800 - protein, 967 aa, Glycine max
  misc_feature (929)..(929): Xaa can be any naturally occurring amino acid
  unsure (1)..(967): unsure at all Xaa locations
MATRNLEKMASIDAQLRQLAPAKVSEDDKLIEYDALLLDRFLDILQGFTWENLKETVQEVYELSAEYEGKHDPKKLEELGNLITSLDAGDSILVAKSFSHMLNLANLAEEVQISRRRRNKLKKGDFADENNATTESDIEETLKKLVFDLKKSPQEVFDALKNQTVDLVLTAHPTQSIRRSLLQKHGRIRNCLSQLYAKDITPDDKQELDEALQREIQAAFRTDEIRRTPPTPQDEMRAGMSYFHETIWNGVPRFLRRVDTALNNIGIKERVPYNAPLIQFSSWMGGDRDGNPRVTPEVTRDVCLLARMMAANLYYSQIEDLMFELSMWRCNDELRVRAEELHRSSKKDEVAKHYIEFWKKVPPNEPYRVVLGEVRDRLYQTRERSRHLLSNGYSDIPEEATFTNVEEFLESLELCYRSLCACGDRAIADGSLLDFMRQVSTFGLSLVRLDIRQESDRHTDVLDAITKHLEIGSYQEWSEEKRQEWLLSELSGKRPLFGPDLPQTEEIRDVLDTFHVIAELPPDNFGAYIISMATAPSDVLAVELLQRECHIKHPLRVVPLFEKLADLEAAPAALARLFSIDWYRNRINGKQEVMIGYSDSGKDAGRFSAAWQLYKAQEELINVAKKFGVKLTMFHGRGGTVGRGGGPTHLAILSQPPDTIHGSLRVTVQGEVIEQSFGEQHLCFRTLQRFTAATLEHGMHPPISPKPEWRALMDQMAVIATEEYRSIVFKEPRFVEYFRLATPELEYGRMNIGSRPAKRRPSGGIETLRAIPWIFAWTQTRFHLPVWLGFGAAFKKVIEENVKNLNMLQEMYNQWPFFRVTLDLVEMVFAKGDPKIAALNDRLLVSKDLWPFGDQLRNKYEETRKLLLQVAGHKEILEGDPYLKQRLRLRHAPITTLNIVQAYTLKRIRDPNYNVKVRPRISKESAEAXKSADELVKLNPTSEYAPGLEDTLILTMKGIAAGMQNTG

SEQ ID NO: 51801 - protein, 540 aa, Triticum aestivum
  misc_feature (106)..(106): Xaa can be any naturally occurring amino acid
  misc_feature (234)..(234): Xaa can be any naturally occurring amino acid
  unsure (1)..(540): unsure at all Xaa locations
MEAAAELAQRLRAAANDRLAGQEPLLLVAAPLLALLAARAVHAAAADVADRGLRTVLITLAMAAVKLVPGVSGYIAAEKSKVVEQLQSGSASSKKNLRTELPAVGXPDGVIDELQALKDKDVRWQGKCSGTVYIAGSESEGHFSLINKAYSMFSHTNPLHQDVFKSVAQLEAEVVAMTAALLGSKEKASGGQICGNMTSGGTESILLAVKTSRDYMQSKKGITKPEIIIAESAXHSAYDKAAQYFNIKVRRVPVNKEFLADVKGFKRCINGNTIMMVGSAPGFPHGLIDPIEELGELASQYGICLHVDLCLGGFVLPFARKLGYPIPPFDFSVKGVTSISTDVHKYGLAPKGTSTVLYRNHEIRKHQFVAVTEWTGGLYISPTMAGSRPGGLVAGAWAAMMSLGLNGYLESTGKIMEVSRKIQKGIDDISGLFVIGKPDMTVVAFGSDAVDIFEVNDIMSSKGWHLNALQRPNSLHICVTLQHTAIYEEFLKDLEDSVNTVKANPGPISGGMAPIYGAAGKMPDRGTVKELLVEFMDSSC

SEQ ID NO: 51802 - protein, 472 aa, Campylobacter jejuni RM1221
MKKIFLSLSLASALFAASINFNESTATANRVNPAAGNAVLSYHDSIKDAKKSVVNISTSKTITRANRPSPLDDFFNDPYFKQFFDFDFPQRKGKNDKEVVSSLGSGVIISKDGYIVTNNHVVDDADTITVNLPGSDIEYKAKLIGKDPKTDLAVIKIEANNLSAITFTNSDDLMEGDVVFALGNPFGVGFSVTSGIISALNKDNIGLNQYENFIQTDASINPGNSGGALVDSRGYLVGINSAILSRGGGNNGIGFAIPSNMVKDIAKKLIEKGKIDRGFLGVTILALQGDTKKAYKNQEGALITDVQKGSSADEAGLKRGDLVTKVNDKVIKSPIDLKNYIGTLEIGQKISLSYERDGENKQASFILKGEKENPKGVQSDLIDGLSLRNLDPRLKDRLQIPKDVNGVLVDSVKEKSKGKNSGFQEGDIIIGVGQSEIKNLKDLEQALKQVNKKEFTKVWVYRNGFATLLVLK

SEQ ID NO: 51803 - protein, 471 aa, Persea americana
MAILVSLLFLAIALTFFLLKLNEKREKKPNLPPSPPNLPIIGNLHQLGNLPHRSLRSLANELGPLILLHLGHIPTLIVSTAEIAEEILKTHDLIFASRPSTTAARRIFYDCTDVAFSPYGEYWRQVRKICVLELLSIKRVNSYRSIREEEVGLMMERISQSCSTGEAVNLSELLLLLSSGTITRVAFGKKYEGEEERKNKFADLATELTTLMGAFFVGDYFPSFAWVDVLTGMDARLKRNHGELDAFVDHVIDDHLLSRKANGSDGVEQKDLVDVLLHLQKDSSLGVHLNRNNLKAVILDMFSGGTDTTAVTLEWAMAELIKHPDVMEKAQQEVRRVVGKKAKVEEEDLHQLHYLKLIIKETLRLHPVAPLLVPRESTRDVVIRGYHIPAKTRVFINAWAIGRDPKSWENAEEFLPERFVNNSVDFKGQDFQLIPFGAGRRGCPGIAFGISSVEISLANLLYWFNWELPGI

SEQ ID NO: 51804 - protein, 1112 aa, Geobacter metallireducens GS-15
MARREPLRGGNPLWYRDAIIYQLHVKAFADSDGDGMGDFRGLMGKLDYLQSLGITAIWILPFYPSPLRDDGYDIADYYSVNPSYNTLREFREFLRAAHARRIRVITELVLNHTSDQHPWFQRARRAKPGSAHRDYYVWSDNPDRYQGTRIIFQDFETSNWSWDPVAKAYYWHRFYSHQPDLNYDNPKVQAEMLRVIDYWLGMGVDGVRLDAVPYLFEREGTNCENLPETHAFLKKLRAHVDASFPNRMLLGEANQWPEDAIAYFGEGDECNMLFHFPLMPRMYMAIEMEDRFPVIDIIDQTPAIPEGCQWAIFLRNHDELTLEMVTDEERDYMYRIYAADPKARINLGIRRRLAPLMERDRRKIELMNALLFSLPGTPIIYYGDEIGMGDNYYLGDRNGVRTPMQWSPDRNAGFSGANPQRLYLPVIIDPEYHYEAVNVEIQERNPTSLLWWMRRTIAVRRRHRAFSSGTLEMLYPANHRVLAFLRRHEDEVILVVGNLSRFAQAVSLDLKEFAGISPADLFSRNRFPVIREIPYPLTLGPHDHFWFILSRAESPRLPEGELPRINLPGGLPWWEALQHTGGDTRLERATTDYLNRSGWFRGKARAIIGYALRDTVLLRTSDQVFPLFFLEVRYQNGAPETYLIPVAFLRGPGAKRVDAESPQAAIASLSVGDEAGILCDALHDREFRDALLALALGRRRLHGKRESLVVPLHGRGGHAEGMRETEHLISELVTGEEASSVILYGDRHVFKLYRTVEPGVNSEVELVRFLTEKSRYPNIVPFQASLELRHPGTEPCTIGLVQEYVKNQGNGWRLALHLLGQYFERILSRRGEIPPPPKRFSSLIDGSACTVPEPVANLIGGFYLEMAGLLGRRTAELHLALAAGGNDPAWKPEAYSTIYQRSVYQSMRNQARRTLQLLSQNRNLLPIDDQGPADRVLGAEKEILSWLAQIVGRRIGTMKIRIHGNFHLGKVLFTGKDFVILDFEGEPDRTLSERRIKRSPLRDVASMIRSFHAATLTALARHGNGRSGDVQLLEPWADACYYHVSCRYLAGYLERMGNSPLVPADRNDLATLLRSFLLDRALRDLGFALGNRPETASSPLKGIETVLREYGE

SEQ ID NO: 51805 - protein, 474 aa, Chlamydia trachomatis D/UW-3/CX
MKIIHTAIEFAPVIKAGGLGDALYGLAKALAANHTTEVVIPLYPKLFTLPKEQDLCSIQKLSYFFAGEQEATAFSYFYEGIKVTLFKLDTQPELFENAETIYTSDDAFRFCAFSAAAASYIQKEGANIVHLHDWHTGLVAGLLKQQPCSQLQKIVLTLHNFGYRGYTTREILEASSLNEFYISQYQLFRDPQTCVLLKGALYCSDFVTTVSPTYAKEILEDYSDYEIHDAITARQHHLRGILNGIDTTIWGPETDPNLAKNYTKELFETPSIFFEAKAENKKALYERLGLSLEHSPCVCIISRIAEQKGPHFMKQAILHALENAYTLIIIGTCYGNQLHEEFANLQESLANSPDVRILLTYSDVLARQIFAAADMICIPSMFEPCGLTQMIGMRYGTVPLVRATGGLADTVANGINGFSFFNPHDFYEFRNMLSEAVTTYRTNHDKWQHIVRACLDFSSDLETAANKYLEIYKQ

SEQ ID NO: 51806 - protein, 316 aa, Schizosaccharomyces pombe
MSATESLVAGRTRRANAGNKMRELLEKEHLRMTQQNAEIEKEDEEYNIEEEEEAERDIEISSESSDEEAELKKLEEEGEEVEKILRDEERIKKRKIQKNRAANLQRTLQPPKRPTPSAASEVPKKKYKKIKVDPSARRTSSRMHTVLMAQSTETRLQEAKPRRKYTVSASANRQKGTMTQQQRFEEAAKTEAQNLSSLRNYVHLEEQRRLRLKRNAAKHRQLREPILKFISKTISTEDGREASNYYVAPLEHPLCHSAPPLQMPQHRAVECVITGKPAIYLDPVTQLPISNVQAFQQVREVYNQRYSWSAMLNLFH

SEQ ID NO: 51807 - protein, 234 aa, Arabidopsis thaliana
MDTNNQQPPPSAAGIPPPPPGTTISAAGGGASYHHLLQQQQQQLQLFWTYQRQEIEQVNDFKNHQLPLARIKKIMKADEDVRMISAEAPILFAKACELFILELTIRSWLHAEENKRRTLQKNDIAAAITRTDIFDFLVDIVPRDEIKDEAAVLGGGMVVAPTASGVPYYYPPMGQPAGPGGMMIGRPAMDPNGVYVQPPSQAWQSVWQTSTGTGDDVSYGSGGSSGQGNLDGQG

SEQ ID NO: 51808 - protein, 385 aa, Rubrobacter xylanophilus DSM 9941
MAEIRFRTREIGSLSKPGWRVKSVVGRPVEEADVEYARRWGERLGVEGHEELVELLGKGTGFTGEEKARIQDFAALYAVRLLESAGLDVVYDGEQRRSEMYDHAVKHARGFEARGTVRSFDNKYYTKAAVVERPRVEGAYDLEEYRFVREHTDRQVKVPFTGAYTIMDWSYDEHYAAEGGLLGAPAERRAEARRRFGVDVARDVVRPNVAGLVEAGADWIQIDEPAATTRPEEVPLVVETFNATREGIEARASMHICFSDYDCLFPHIERLEDCYELQLEFANRDSRRPGTKEEDRPGYAVLRRFAQSDWDGKIGLGVIDIHTDFIEPPELVRDRILHACAVLGPERLEVNTDCGLRTRTWEVAFEKLRNMVEGTRLAEAALNGA

SEQ ID NO: 51809 - protein, 549 aa, Oryza sativa
MDSARSWFTKLQTREKSIGKKKELPPNGKEGTDEAPSSATKQRVAAAKQYIEKHYKEQMKNLQDRKERRCSLEKKLADANVSEEEQHNIVKQFEKKETEYMRMQRHKMSVDDFDLLTMIGKGAFGEVRVCREKNTGNVYAMKKLRKSEMLRRGQVEHVKAERNLLAEVDHHCIVKLYCSFQDSEYLYLIMEYLPGGDMMTLLMRKDTLTEDEARFYVGETVLAIEAIHRHNYIHRDIKPDNLLLDRHGHLRLSDFGLCKPLDYSNFPDLNEKDVTSTKPQSTNGDGRQQSMPKRTQQEQLEHWQKNRRTLAYSTVGTPDYIAPEVLLKKGYGMECDWWSLGAIMYEMLVGYPPFYSDEPMTTCRKIVNWRTHLKFPEEARLMTDAKDLISKLLCNVDQRLGTKGAEEIKEHSWFSGVEWDKLYEIEAAYQPQVTDELDTQNFEKFEESSDNIQCSAKAGPWRKMLSSKDLNFVGYTYKNFELVNDPEVLGMAELKKKEKAKRPSAKSLFDSSPDAEEQPAPAPAPAENDEGSTRSTEPDMPKSLSAPST

SEQ ID NO: 51810 - protein, 400 aa, Rubrobacter xylanophilus DSM 9941
MEGRCRPKQRRKVSPMQNKYRLMSPGPTPIPPEVSAAGALPIIHHRTPEFGEVFTRVNENLKRVFLTENDIFTYASSGTGAFEGALQNLFSPGDKVLVVNNGNFGGRWAKMGRAFGLEVTELTYEWGQKADNEEVAEALAADPQIKGAVCVLSETSTGTVNDIRGFAKATENVLTIVDAVSGLGCCELRTDEWGVDVVVAGSQKALMTPPGLGFVSVSERAWKAHEESRMPRYYFDWTAAKKAYRKDPPQTPWTPAVSVILQLDLALRQILEEGLENVLERHVLLGRAARAGVKGMGLRLFGPDEDMNAAVTAAWVPEGVDGKQLVRMVFREHGIQVAGGQGPMEGRIFRIGHCGYFDAYDIIATVAALELALESLGYPVELGRGVGAAQRVFSKSGVAA

SEQ ID NO: 51811 - protein, 159 aa, Triticum aestivum
  misc_feature (45)..(45): Xaa can be any naturally occurring amino acid
  misc_feature (56)..(56): Xaa can be any naturally occurring amino acid
  misc_feature (67)..(67): Xaa can be any naturally occurring amino acid
  unsure (1)..(159): unsure at all Xaa locations
WHVLTIPYGAFGAADLRDMVARGRGGGRAPIWWAEAATGEHFQGXLVDWVEAQRPXEPTVARAYIAXGDHDGGEGETASCVVSSGLRLPFGEVDFGWGRPAFASYHFPWPGGARYVMPIPSARGGGDWVVYVHAAPEVVKVMEEEPTVYRAPGSSDIFG

SEQ ID NO: 51812 - protein, 140 aa, Brassica napus
PGRHTPLVGIIAGVYGENGSLVYPGYGYAAYPYSPATSPAPQVGGDGQLYGAQHYQYPAFFPAGPVATPAQGDLTANKAGGVKTLPAESKNVASAAGIAKGAPGKPNSQTTLNTASNFYGNGGPGSGFAAGYHDPRYSYD

SEQ ID NO: 51813 - protein, 462 aa, Escherichia coli
MKKTKIVCTIGPKTESEEMLAKMLDAGMNVMRLNFSHGDYAEHGQRIQNLRNVMSKTGKTAAILLDTKGPEIRTMKLEGGNDVSLKAGQTFTFTTDKSVIGNSEMVAVTYEGFTTDLSVGNTVLVDDGLIGMEVTAIEGNKVICKVLNNGDLGENKGVNLPGVSIALPALAEKDKQDLIFGCEQGVDFVAASFIRKRSDVIEIREHLKAHGGENIHIISKIENQEGLNNFDEILEASDGIMVARGDLGVEIPVEEVIFAQKMMIEKCIRARKVVITATQMLDSMIKNPRPTRAEAGDVANAILDGTDAVMLSGESAKGKYPLEAVSIMATICERTDRVMNSRLEFNNDNRKLRITEAVCRGAVETAEKLDAPLIVVATQGGKSARAVRKYFPDATILALTTNEKTAHQLVLSKGVVPQLVKEITSTDDFYRLGKELALQSGLAHKGDVVVYGFWCTGTERHY

SEQ ID NO: 51814 - protein, 588 aa, Pseudomonas aeruginosa UCBPP-PA14
MPAILSSRQRIALRLAWRFMAPYRWRMLGALVALLFTAAITLSLGQGIRLLVDQGFLTASPELLNRYILLFFVLVLGLAVGTFVRFYLVSWIGERFVADIRKRVFDHLIELHPGFYETNRSSEIQSRLTADTTLLQTVIGSSLSMALRNALMLVGGVLLMFVTNAKLTSIVVLALPLVIAPILLFGRRVRSLSRESQDRVADVGSYVGETLGQIKTVQAYNHQAQDRQRFAGTVERAFDTARKRIAQRAWLITVVIVLVLGAVGIMLWVGGRDVIAGSISAGELAAFVFYSLIVGMAFGTLSEVIGELQRAAGAAERIAELLRARSEIRPPAQPRKLAARVSGRIELQAVRFAYPTRPEHWAIDDISLAVEPGETLALVGPSGAGKSTLFDLLLRFFDPQQGRLLLDGQPIVELDPADLRRSFALVSQNPALFFGSVEENIRYGRPHASAAEVEAAARAAHAHEFILGLPQGYATHLGEGGIGLSGGQRQRLAIARALLVDAPVLLLDEATSALDAESEHLIQQALPGLMSGRTTLVIAHRLATVQSADRIAVIDQGRLVAIGSHARLIAENPLYARLAELQFAVGGR

SEQ ID NO: 51815 - protein, 238 aa, Oryza sativa (japonica cultivar-group)
MPSRTAPFISRLRLLRTAAALSPFSSSAPPRHSPRILRAIPVGAPHPPRVSAAVSPLVRPVAAGFALFSMATAASSAASVHDFTVKDASGKDVDLSTFKGKVLLIVNVASQCGLTNSNYTELSQLYEKYKDQGFEILAFPCNQFGGQEPGTNEEIVQFACTRFKAEYPIFDKVDVNGDNTAPIYKFLKSSKGGLFGDNIKWNFSKFLVDKEGRVVERYAPTTSPLSMEKDIKKLLGSS

SEQ ID NO: 51816 - protein, 764 aa, Burkholderia fungorum LB400
MARTHIPGFPRIGAQRELKFAQESFWRGESGEPHLRGVARELRARHWQLQQDAGLDFVTVGDFAYYDQMLNLSALLGALPQRFGFEPKTLSLAEYYELARGNAAQPAMEMTKWFDTNYHYLVPELGPQTSFDGGVEWLFEEIDEALALNLPVKPVLIGPITYLWLSKSHVAGFDRLSLLPKLVIRYARLLDKLRQSGIEWVQLDEPALCVDLPAEWLDAFSAAYEVLGTSGVKVLLATYFESAAEHAPRVAALPVAGVHLDLVRAPQQLDAWRAALPAHAVLSAGVIDGRNIWRADLGEIVESLQSLQAEFGERLWIAPSCSLLHVPVSLDAEKKLDADLKSWLAFATEKLAEVATLALALRDPAAAEPALAATDRALEARRRSSAVVNALVQKRVAAVSSAMAERQSPFAERNRLQREALGLPLLPTTTIGSFPQTAAIRQARAAYKRGELRALDYLQRMRTEIEIAVRKQEELGLDVLVHGEAERNDMVEYFGEQLWGYAFTENGWVQSYGSRCVKPPIIYGDVYRPEPMTVETTRYAQSLTQRLMKGMLTGPVTMLQWSFVRDDQPRSTTALQLALAIRDEVVDLEKAGIRIIQIDEPAFREGLPLRRADWAAYLEWATRAFRISAAGVADQTQIHTHMCYSEFNDILPSIAAMDADVITIETSRSAMELLDGFGAFAYPNEIGPGVYDIHSPRVPGADAMQRLLERACEVIPAERLWVNPDCGLKTRGWPETEAALANMVRAAKALRAKLAARQADELTA

SEQ ID NO: 51817 - protein, 334 aa, ASPERGILLUS NIDULANS FGSC A4
MPKVLLTGGSGFIAAHILDQLLERGFDVVTTVRSKEKGEKILAAHPNTPKEKLSYVIVKDVAQDGAFDEAVKSDPPFDYVLHTASPFHYNVQDPVRDFLDPAIKGTTGILKAIKAYAPNVKRVTITSSFAAIVNVKNHAKVYSEEVWNPITWEEGLDSSQTYRASKTLAEKAAWDFVEKEKPSFDLATINPPLVLGPVVHYLSSLDSINTSNARISSFVRGFSKDALPPTGTYVWVDVRDVALAHVRTIEVPEAGGQRFFITAGHYSNKDIVDIIRDAYPELEDRLPPKDAPSDMPKDVYGYDNSKSMQVLGLKYRGLKESVVDTVKSLLENGA

SEQ ID NO: 51818 - protein, 449 aa, Zea mays
  misc_feature (245)..(245): Xaa can be any naturally occurring amino acid
  unsure (1)..(449): unsure at all Xaa locations
MPQSVLVERATSESLIGPDWSLNLEICDILNHDPSQAKDVVKTIKKRIAHKNSKVQLLALTLLETLIKNCGDFVHMQVAEKDMLHEMVKIAKKKPDYHVKEKILILIDTWQEAFGGARARYPQYYAAYQEMLRAGAVFPQRPESTVPIYTPPQTQPLRNYPPPALRNTDYRHDVPESSSAPEVPALSLTEIQNARGVMDVLSEMLNAIDPGNREDCMQEVIVDLVDQCRSYKQRVVQLVNSTSSXEQSNDLPLPPWEALPAETEQLEADHPGGLSALPQFGVSQPQPVQITHSGQQVLPSQLMPTGQPGGQFQPRFGAQQPYATENTQYGGMYPPVQGNQPTGIYPQQMAGDVYQQQMFGGQMIGYGYGPQPGGYYVPNAAYAYAGANDLSQRMNGLSMQGNSLYGTPASSSLQQRNRPSRPEDSLFSDLVSIAKTKPCKTASNKAGNL

SEQ ID NO: 51819 - protein, 151 aa, Zea mays
MSSSSLSPTAGRTSGSDGDSAADTHRREKRRLSNRESARRSRLRKQQHLDELVQEVARLQADNARVAARAADIASQYTRVEQENTVLRARAAELGDRLRSVNEVLRLVEEFSGVAMDIQEEMPADDPLLRPWQLPYPAAAMPIGAPHMLHY

SEQ ID NO: 51820 - protein, 348 aa, Treponema denticola ATCC 35405
MSIKIRTAAVTGPHKVEILELNTPDLRSGEVLVKVHAVALCTLEQRIFRGEIPMPLPCTGGHEVSGEVVALGDGVNTKKWSAGDRVAVRLLYNCGECHYCHSGHNNLCERAQKKPVRENLLVGPGGLCDYIIVNTSALFPISDELSYEEACLTEPLACCVHSIERANLQLGEDVVVIGGGIMGQYHIMLAKCRGCRVILSEVDPERCKLGKQLGADIVFNPLEHDPVTFIQSLTNGRGADAVFNTTPIPGVVPQAIAMTGKCGRMIQYSSMHPDSPTPVSPQMLHGSEIVLTGAISPDERNFYTANRLLSTGIINCKPLIAKKFPFEEAQKAFEAAIVPGTFRMIITD

SEQ ID NO: 51821 - protein, 190 aa, Glycine max
VRDPILFPSFIHTQKRNPATHLKDVNMVWDFFTLRPESTHQAMFLFSDRGIPDGYRKMNGYGSHTFKLVNDKNEVVYCKFHMKTAQGIKNLPVDKAEQISAQDPDYSIRDLYNAIANGDYPKWNFFIQVMTVAQAEKNKFNPFDVTKVWSHKEFPLIPVGQLVLDRNPTNYFAEVEQIAFAPSHLVPGIE

SEQ ID NO: 51822 - protein, 771 aa, Ustilago maydis 521
MAFRQRVLPLLGASAVGVGIGYYVFDPLLQQYAKDTNGTYVAGPPGTNSLPDLKPHPGATTELHERPPLGSSAARGISGPIARPGVDLKHNEANQLPGSVPYGTVSKEIEQLRRNVNDKIGYAEHKLQDAKHGIENKYRDVKDEVKDTYRSARGTAQDAVDTAANKAENVKHDVKSGWFSAKNTVEQKASEAEAEVKKGWFAARDKAEQAGDQAKSTLYSAKDATQQKADEAADQAKKGWFAAKDTAAEAGEQAKSSWFSTKSAAEQKADEAADKAKQGWFAAKDKAAEAEEQAKSSWFSTKSAAEQKADEAADKAKQGWFAAKDKAAEAEEQAKSSWFSTKSAAEQKADEAADKAKQGWFAAKDTAAEAGEQAKSAWFSTKSAAEQKADEAADKAKQGWSAAKDTAAEAGEQAKSSWFSTKSAAEQKADEAADKAKQGWSAAKDTAAEAGEQAKSSWFSTKSAAEQKADEAADKAKQGWFAAKDTAAEAGEQAKSSWFSTKSAAEQKADEAADKAKQGWFAAKDTAAEAGEQAKSSWFSTKSAAEQKADEAADKAKQGWFAAKDKAAEAEEQAKSSWFSTKSAAEDKYENAKDEAQKGWFNLKSKAEDAADDARSSLEHNAQQKILAAQYNAEVRAGEARGQLIQNDHLKGDFKDIKQTGKDWKSELEAKAHEARNAAESEYRHLRDQSQQGYRNLKDEANSSLYNLRDKADSGYESLRAKAAEGLDYAGDKLHSGARKIEGDQKPQSTGLWNWIFGNGRATESVASNLE

SEQ ID NO: 51823 - protein, 681 aa, Nicotiana sylvestris
MSGSGCSIVWFRRDLRVEDNPALAAGVRAGAVIAVFIWAPEEEGHYYPGRVSRWWLKQSLAHLDSSLKSLGTSLVTKRSTDSISSLLEIVKSTGATQLFFNHLYDPISLVRDHRAKEVLTAQGISVRSFNADLLYEPWEVNDEEGRPFTTFSAFWEKCLSMPYDPEAPLLPPKRIIPGDASRCSSDSLVFEDESEKGSNALLARAWSPGWSNADKALTTFVNGPLLEYSQNRRKADSATTSFLSPHLHFGEVSVRKVFHFVRIKQVLWANEGNKAGEESVNLFLKSIGLREYSRYMSFNHPYSHERPLLGHLRYFPWVVDEGYFKAWRQGRTGYPLVDAGMRELWATGWLHDRIRVVVSSFFVKVLQLPWRWGMKYFWDTLLDADLESDALGWQYISGTLPDGREFDRIDNPQFVGYKCDPHGEYVRRWLPELSRLPTEWIHHPWNAPESVLEAAGIELGSNYPLPIVEIDSAKVRLEQALSQMWQHEAASRAAVENGMEEGHGDSADSPIAFPQAMHMEMDHEPVRNNNPVIVTVRRYEDQMVPSMTSSLFRVDDEETSVNIRNSVVDTRAEVPNDVNVTEGPRRDTLDQAVTQPARTNTTPPQFNFVVGRRNSEDSTAESSSSTRERDGGVVPVWSPSSTNYSDQYVGDDNGIGTSSSYLQRHPQSHQLMNWQRLSQTG

SEQ ID NO: 51824 - protein, 418 aa, Xanthomonas campestris pv. campestris str. ATCC 33913
MAPDLRHLHTFGELDPPQRLLMGPGPVNAHPRVLRAMAADLLGQFDPEMTTYMNEVMALYRPLFGTQNRWTFLVDGTARAGIEAALVSLVQPGDRVLVINFGRFGLLLTEILGRLGADVHTVDAPWGEVVPLAAIAEAIASVAPKLVATVHGDTSTTMAQPLDGLGALCRAAGALSYVDATATIGGMDIASDRWEVDVVTAGLQKCLGGPSGSAPITVSAAAAEAIFARRHVERGIVREDIANGSGPRIASNYFDLAMIMDYWSDKRLNHHTEATTMLYGARECARVALQEGLEARYARHAAAGRAVSAGVRALGLEVFGDDAHRMSNVTGVVIPHGVDSEAVRRRMREDFEIEIGTAFGPLQGRIWRIGAMGYNAMKHKVLLTLAALEAVLRAEGYACTQGLAVEAARAAWHAEPAA

SEQ ID NO: 51825 - protein, 641 aa, Nicotiana sylvestris
MESNSKTIVWFRRDLRIEDNPALAAAARNGSVFPVFIWSPKEEGQFYPGRVSRWWLKQSLIHLEQSLKSLGAELVLIKAQSTLSALLDCIEAVGATKVVYNHLYDPVSLVRDHNIKQKLGELGISVQSYNGDLLNEPWEVYDDDGKVFTTFDAYWEKSLRLQKEPVSHLPPWKLIPAAGSVKMCSVEELGLENESEKSSNALLGKGWAPGWSNADKALTEFVENQLLAYSKDRLRVGGNSTSLLSPYLHFGEVSVRKVFNSVRLKQILWTKEGNSVGDESASLYLRAIGLREYSRYICFNFPFTHERSLLNNLKFFPWNADQARFKAWRQGRTGYPLVDAGMRELWATGWIHNKIRVIVASFFVKFLLLPWQWGMKYFWDTLLDADLESDIIGWQYISGSLPDGHELERLDNPEVQGFNYDPEGEYVRHWLPELARMPAEWIHHPWDAPLTVLKAAGVELGMNYPNPIIDVDVARDRLMQAIFIMREKEAAANAADANGTNEVVFDNSENVGDSVNPKVVKGKVPCPSSSSYDQRVPSMQKGSTNKKRPNPVEEEKKFKDNWLSCKIKTEGKISKADDDLCSTAESSSMKKQMTTSRNSFSVPQAISMSYDIKSFDGEASSHVKLQNEEEIDMEINSCKNE

SEQ ID NO: 51826 - protein, 276 aa, Streptomyces sp. TP-A0274
MTQQSDTTADSVGEVYDQFADAGASTAMGGNIHVGYWDDDDPEVPIAEATDRLTDLVAERLALRPDRQLLDVGCGIGVPALRIAGAHDVRVTGITVSQQQVTEAAARAVESDAGGRVSFRLADAMDLPFEDVSFDGAFAIESLLHLPDQTPALKEIHRVVRPGGRLVIADLCQRQPFTGADKEVLDGMLLMYEIAGINTPEEHHARLAEAGWELLELTDIGEQVRASYGHAAAAFRGLAGALDAGAAQQMNAAADLMEAFGGHPYAGYVLITAQRS

SEQ ID NO: 51827 - protein, 255 aa, Cynodon dactylon
AIDWIWKVIEHYNFAPLTAVLSVNYLDRFLSTYEFPEGQAWMTQLLAVACLSLASKVEETFVPLPLDLQVAEAKFVFEGRTIKRMELLVLSTLKWRMQAVTACSFIDYFLHKLNDHGAPSMLARSRAADLILSTAKGAEFLVFRPTEIAASIALAAMGELRSSVLERAATGCKYLNKDNVSRCYGMIQEKITLGNIALKSAGSSLSSVPQSPIGVLDAGACLSQQSDDATVGSSPATCYHSSSTSKRRRISSRLI

SEQ ID NO: 51828 - protein, 364 aa, Plantago major
MEGRGCFGNFFERAKPYIAMICLQFGYAGMNIITKVSLNRGMSHYVLVVYRHAFATAVIAPFAIILERKVRPKITFTIFMQLFVLGLLGPVIDQNFYYAGLKFTSPTFSCAMSNMLPAMTFVMAVICRMEILDLKKVRCQAKLFGTIVTVAGAMLMTLYKGRVINFFWSQFIHPGVSSNAPDQTTQHSDSDWLKGSILLITATLAWAAFFILQAITMRKYTAHLSLTALVCFLGTLQSIAVTLVMEHRPHAWVVGWDMNLLAAAYAGIVSSGIAYYVQGLIMQKRGPVFVTAFSPLMMIIVAIMGSFILAENIYLGGVLGAVLIVIGLYSVLWGKYREYKDKEAEEIPEPMKGINGNNKMGAID

SEQ ID NO: 51829 - protein, 355 aa, Zea mays
MVPGYDCAASVLLCAEDNAAVLGLDDESSWAAAATPPRDTVVAAAAAGVAVDGFLTEFPLLSDDCVAALVEKEVEHMPAEGYLQKLQRRHGDLDLAAVRKDAVDWIWKVIEHYSFAPLTAVLSVNYLDRFLSTYDFPEGRAWMTQLLAVACLSLASKIEETFVPLPLDLQVAEAKFVFEGRTIKRMELLVLRTLKWRMHAVTACSFVEYFLHKLSDHGAPSLLARSRSSDLVLSTAKGAEFVVFRPSEIAASVALAAIGECSSSVIERAATSCNYLDKERVLRCHEMIQEKIAVGSIVLKSAGSSISSVPRSPIGVLDAAACLSQQSDDATVGSPAVCYHSSSTSKRRRITRRLL

SEQ ID NO: 51830 - protein, 450 aa, Chlamydophila abortus S26/3
MELQKAGQMIENDFQGYPSSYQVSHFYRDKVGVIVLCGGEGRRLSPLTCWRCKPTVSFGGRYKLIDVPISHAIASGFSKIFVIGQYLTYTLQQHLMKTYFYHGVLQDQIHLLAPEGRDGSQVWYQGTADAIRQNLLYLEDTEIEYFLVLSGDQLYNMDFRRIVDYALYAKSDMVIVAQPIQEKDASRMGVLQIDKDGNLLDFYEKPQEQEILNRFRLSPADCRRHKLDPQYGNFLGNMGIYLFRRESLFQLLLEEPGDDFGKHLIQAQIQRGTVKTFLYDGYWTDIGTIESYYEANIALTQRPRPHVRGLNCYDDRGMIYSKNHHLPGTIVSDSMISNSLLCEGAVIDSSKVSHSVVGIRGVIGKNSVIDHSVVMGNDRYGNTLQTPLGIGDNCEIYKTIIDENCRIGNGVKLTNIKGYKDYDSPDGKLVVRDGIIIIPRGTRIPNNYTF

SEQ ID NO: 51831 - protein, 568 aa, Methylococcus capsulatus str. Bath
MSPWHRPMLVETFNTLRDFVRLHEIASVLVRFGFGEAVHRLGIHRVLEKAGKSLSWKYAEEQAQLSLPARMRHALEEMGPSFIKLGQILSTRVDLLPPEWIEELSHLQRRVPPLPFESLRWQLERDLGAPVDKVFAEFDVRPIAAASIAQVHRARLLTGEEVVVKIRRPGITKTIDADLRLMAKLAKLIEFEFPELDYLRPSEIVHQFGLSIHRELNFINECRNTDRLAANFRTDPRIVIPRVHWQYVRERVCVMDYIEGIDAMDLDAVRAADLDQRTLARVGADAMLKMILLDGFFHADPHHGNLLYLPNNRIAFLDFGMVGRLPELRRHQLVDLLSAIVGRDAQTAADVLLDWAATVNVDPDLLVADMDNLIDDYHGATLRQLSLTQMLTDLTQLMRQHRLALPPDLTLLFRALITLDGIGKQNDPDFDIFAQAAPFIEKSLKERYDPEKIARNAWRNTLHALDMVAGLPTELRRVSRAVQKGALKLNIDLARLDHLGWQVERALGWLSLGLVASALIIASAIVMTVQGGPTLWGLPAFGLLGYVGASAMATWLLVAIWRGTRGKH

SEQ ID NO: 51832 - protein, 294 aa, Triticum aestivum
RSVPALQPGRSLFSVVKAFASGVILATGYMHVLPDSFDSLSSPCLPKKPWGDFPFTAFVAMLAALFTLAVDSLMLTFYNRNNKVGSGPSSAAVASHESPEQEGHWHSHGHEHAHGHAHGMMLDKPEDAEAGQMQLRRNRVVVQVLEMGIVVHSVVIGLGMGASQSVCTIRPLVAAICFHQMFEGMGLGGCILQAEYGVKMKAGLVFFFSTTMPFGVALGLALTKVYRDNSPTALIVVGLLNAASTGLLHYMALVELLAADFLGPKLQGSVRLQLVCLAAVLLGAGAMSVMAKWA

SEQ ID NO: 51833 - protein, 499 aa, Magnaporthe grisea 70-15
MGSVEDETALPSGGRLLLISNRLPITIKRSDDGQYSFSMSSGGLVTGLSGLAKTTSFQWYGWPGLEVPDAEAGPVVQRLKNEYGAHPVFVDDELADRHYNGFANSILWPLFHYHPGEITFDESAWSAYKEVNRLFAQTVVKDVQDGDMIWVHDYHLMLLPEMLREEIGDSKKNVKIGFFLHTPFPSSEIYRILPVRQALLQGVLHCDLLGFHTYDYARHFLSSCSRILSAPTTPNGVQFAGRFVTVGAFPIGIDPEKFVEGLQKPKVQQRIAALTRKFEGVKLIVGVDRLDYIKGVPQKLHALEVFLTEHPEWIGKIVLVQVAVPSRQDVEEYQNLRAVVNELVGRINGKFGTIEFMPIHFLHQSVSFDELAALYAVSDVCLVSSTRDGMNLVSYEYIATQRDRHGVMILSEFTGAAQSLSGSLIVNPWNTEELANAIHDAVTMGPEQREANFKKLERYVFKYTSAWWGSSFVAELNRLAAGIEGADAEGSKTKIAIRG

SEQ ID NO: 51834 - protein, 451 aa, Burkholderia mallei ATCC 23344
MNAPTEPTAPDTTVRTDAEWLDAHWMPFTANRQFKRDPRIIVEGKGAYYTAADGRQIFDGLSGLWCCGLGHGRAEISDAVARQVARLDYSPAFQFGHPQSFELANRIKAMTPAGLDYVFFTGSGSEAADTSLKLARAYWRAKGKGTKTRLIGREKGYHGVNFGGISVGGIGPNRKLFGQGIDADFLPHTQLPENRFSRGLPERGAELAERLLDLIALHDASNIAAVIVEPFSGSAGVVVPPKGYLQRLREICTAHDILLIFDEVITGFGRTGAMTGAEAFGVVPDIMNVAKQVTNGAQPLGAVIASKDVYDAFMAAGGPDYMLEFSHGYTYSAHPVACAAGVAALDLLVKEDALGRVRELAPYFEAAVHGLKGVRHVADIRNCGLAAGLTIEHAPGEPARRPYEIAMHCWKNGFYVRYGGDTIQLAPPFIAEKREIDSLIGALNDALLATD

SEQ ID NO: 51835 - protein, 216 aa, Plantago major
TRKGSILLIIATLAWAAFFILQAITMRKYTVHLSLTALVCFLGTLQSIAVTLVMEHRPHAWVVGWDMNLLAAAYAGIVSSSIAYYVQGLVMQKRGPVFVTAFSPLMMIIVAIMGSFILAENIYLGGVLGAVLIVIGLYSVLWGKYKEYKEKEAEEIPEPMKGISGNNNMGTIDEDIEANIIVECEKHECRRMSFPAIAISSPMPNPPMLAKLAPKA

SEQ ID NO: 51836 - protein, 162 aa, Leifsonia xyli subsp. xyli str. CTCB07
MSLMDIPFRTIDGEPTSLAAFAGKVILVVNVASRCGLAPQYEKLEGLQKTYGDRGFTVIGFPSNQFLQELNSTDAIKEYCSTTWGVTFPMMEKVKLNGRSAHPLYAELTTYPDAAGKAGKVKWNFEKFMITPGGAVHRFRPTTEPDAPEIIGLIEQALPTAV

SEQ ID NO: 51837 - protein, 328 aa, Corynebacterium diphtheriae NCTC 13129
MKLLVTGGAGYVGSVCSTVLLEQGHEVTIVDNLTTGNRDAVPLGATFVEGDIKDVADNVLSSDSFDAVLHFAARSLVGESVEKPDEYWQHNMVTTLALLDAMKRNNVRNIVFSSTAATYGEPETVPITEDAPTHPTNPYGATKLSIDYAITSYAHAYGFAATSLRYFNVAGAYGLVGENREIETHLIPLVLQVALGHRDKIFMFGDDWPTEDGTPIRDYIHIRDLADAHILALQSNVEGSHRIFNLGSGEGYSVKQVIDTCREVTGHLIPAEVAPRRAGDPAVLIASSAKAQSELGWKPQRTDLHTIVSDAWAFTSQLGDKAHSASRG

SEQ ID NO: 51838 - protein, 331 aa, Chlamydia trachomatis D/UW-3/CX
MHFSNCLYQAFEDQLLPEPLYQKFQICYQTYIEAASKKCSAEKAEALCSQWLKVIIDDLKNPIIFPPYHKKIRSPIDLYQFGIDFFSALIDDQKSQILHPERLDQIQEYIQAGHNVVLLANHQTESDPQLMYCLLGASYPQLMESMIFVAGDRITSDPLARPFSMGCDLLCIYSKRHINHPPELKEEKLMHNQKSMRTLKMLLSEGGKFFYVAPSGGRDRKNLQGELYPAEFHPDSVEMFRLLAKSSGKTTHFFPLAMKTYDILPPPPTIEEAIGEHRVISFAPVAFNFGDELLLDELCSSEEADIHDKHALRALRASRAFSIVTDLYKEI

SEQ ID NO: 51839 - protein, 122 aa, Arabidopsis thaliana
MAKSSFKISNPLEARMSESSRIREKYPDRIPVIVEKAGQSDVPDIDKKKYLVPADLTVGQFVYVVRKRIKLGAEKAIFVFVKNTLPPTAALMSAIYEZHKDEDGFLYMTYSGENTFGSLTVA

SEQ ID NO: 51840 - protein, 427 aa, Pseudomonas aeruginosa UCBPP-PA14
MGDAFQEPLWRQVLSGAQMLFVAFGALVLMPLITGLDPNVALFTAGLGTLLFQLVTGRQVPVFLASSFAFITPIILAKGQFGLAATMGGVVAAGFVYTFMGLAVKIKGTGFIDKLLPPVVIGPVIISIGLAMAPIAANMAMGKAGDGSELLPYRTAMMISMPALLTTLVVAVFGKGIFRLVPIIAGVLVGFALSFVFGVVDTAAIVAAPWLELPKFTAPEFNWQAILFIVPVALAPAIEHIGGVIAVGGVTGQDYLKKPGLHRTLLGDGLATSAAGLFGGPPNTTYAEVTGAVMLTKNYNPKIMTWAAVIAITLAFVGKFGAILQSIPVPVMGGILCLLFGTIASVGMNTLIRHKVDLSEARNLVIVSVTLVFGIGGVLIGSGTGPDDIGLKGIALCAIVAIVLNLLLPGNDGWQNKALDEQHKDSH

SEQ ID NO: 51841 - protein, 452 aa, Gluconobacter oxydans 621H
MAAPALRRSVLSLAAGVVALPAIAHAAPAAAPIDTGDTAWMLVSTAFVLMMTIPGLALFYGGMVRKKNVLATLIQSFMICCIGSLVWMVAGYSLAFSTGSPWIGDLSRVLLRGVADNFHEGVDTAFTLGAGTPAAVTMTIPESVFMMFQMTFAVITPALITGAYAERMKFSSMCLFTVAWLLLVYAPVAHWVWSPTGWVAGLGAVDFAGGTVVHINSGVAGLVCAIILGRRKGFGTEDLSPFNLTYAIIGASLLWVGWFGFNAGSALGANGRAGMAMLTTQVAAAAGGVAWMVVEWARTGKPTALGIISGAVAGLVAITPAAGFVLPGSAVLIGLIAGAGCFWSATWLKHRFNYDDSLDAFGVHGTGGIIGAILTGAFAYGPLSATASNPEGTVASVHQVVAQAEAVGVTVVWCVIMTTLILKVLDLVMGLRVSPEEELEGLDMVLHGERIN

SEQ ID NO: 51842 - protein, 468 aa, Magnetococcus sp. MC-1
MSDTFDLVVIGGGPGGYVAAIRAAQLGLKTACIDKRPTLGGTCLNVGCIPSKALLQSSHQLETAQHAMAAHGVEIKGVKANLTTMMQRKQEVVQGLTQGIAFLFKKNKVTHLMGSGTIVDSSHVQVTAADGSVQTLTTENILIASGSEVATLPGLEIDEKHIISSTGALALDKVPKKMVVIGAGVIGLELGSVWRRLGAEVTVVEFLDGILPGMDGEIRKTAQRTLSKQGMHFKLGTKVTAASVLKNGVKLTMEPVKGGEAEERQADVVLVAVGRRPYTQGLGLENIGVTLDERGFIPVDHDRQTTCAGVFAIGDVIGGAMLAHKAEEEGSAVAEALAGQVAHVNYDAIPAVVYTHPEIASVGQSEESLTAAGIPYKVGKFPFMANSRARAIGDAEGFVKILAHATSDAILGAHIIGPAAGDLIAEIVLAMECDISAEDIARTCHAHPGLGEAVKEAALAVDKRAIHA

SEQ ID NO: 51843 - protein, 589 aa, Arabidopsis thaliana
MEAKIVKVLDSSRCEDGFGKKRKRAASYAAYVTGVSCAKLQNVPPPNGQCQIPDKRRRLEGENKLSAYENRSGKALVRYYTYFKKTGIAKRVMMYENGEWNDLPEHVICAIQNELEEKSAAIEFKLCGHSFILDFLHMQRLDMETGAKTPLAWIDNAGKCFFPEIYESDERTNYCHHKCVEDPKQNAPHDIKLRLEIDVNGGETPRLNLEECSDESGDNMMDDVPLAQRSSNEHYDEATEDSCSRKLEAAVSKWDETDAIVVSGAKLTGSEVLDKDAVKKMFAVGTASLGHVPVLDVGRFSSEIAEARLALFQKQVEITKKHRGDANVRYAWLPAKREVLSAVMMQGLGVGGAFIRKSIYGVGIHLTAADCPYFSARYCDVDENGVRYMVLCRVIMGNMELLRGDKAQFFSGGEEYDNGVDDIESPKNYIVWNINMNTHIFPEFVVRFKLSNLPNAEGNLIAKRDNSGVTLEGPKDLPPQLESNQGARGSGSANSVGSSTTRPKSPWMPFPTLFAAISHKVVENDMLLINADYQQLRDKKMTRAEFVRKLRVIVGDDLLRSTITTLQNQPKSKEIPGSIRDHEEGAGGL

SEQ ID NO: 51844 - protein, 464 aa, Oryza sativa
MACHISARSRYENYHEIYGGEVESRTSNYADLANKYYDLVTSFYEYGWGESFHFGSRWQGETLRESLKRHEHFLALQLGLKKGMKVLDVGCGIGGPLREIARFRDKNQANYNYSNATNYSSASVTGLNNNAYQISRGKELNFSVGLSETCNFVKVTKARIVMQADFMNMPIPDATFDAAYAIEATCHAPDAVGVYREICRVLKPGQLFALDEWCMTDKYDPGNSRHRSIKAEIELGNGLPDIRTTKQCIQALKDAGFEVVSVKDLAEDSPLPWYLPLDSSQFSLNGFRLTRVGRFITHMLVKTLECLHVAPQGSLRVSSFLETAAEGLVKGANIAVAATSANATAAKAALAPPPPAAALALGAGAVVVEEDELSVVGEEDSGGDDETAGDGAAAAPRLEAAGAGEGASEEEERCGLRTRMLTFWPAAQWPGTPQMKKRWPAALMAILSSPEVCVAIGDELVQLS

SEQ ID NO: 51845 - protein, 396 aa, Oryza sativa (japonica cultivar-group)
MALRPNDVTLRLTPPLAAAARRNRRAAAGGVRVYAVASGAVSTKVENKKPFAPPREVHVQVTHSMPPQKIEIFKSLDDWARDNILSHLKPVEKCWQPQDFLPDPASDGFHDEVKELRERAKEIPDDYFVCLVGDMITEEALPTYQTMLNTLDGVRDETGASPTAWAVWTRAWTAEENRHGDLLNKYLYLTGRVDMRQIEKTIQYLIGSGMDPRTENNPYLGFIYTSFQERATFISHGNTARHAKDFGDLKLAQICGIIASDEKRHETAYTKIVEKLFEIDPDGTVLAFADMMKKKISMPAHLMFDGEDDKLFEHFSMVAQRLGVYTAKDYADILEFLVSRWKISDLTGLSSEGNKAQDYLCTLAARIRRLDERAQSRAKKAGTLPFSWVYGREVQL

SEQ ID NO: 51846 - protein, 538 aa, Zea mays
MALPKIPMRHHKAPAPVSCEGASELARKDPDSPTPASHKVQPRCYRNAEKCLTLPESATCAVAATATASTSRTGRFIGLVAGFSGTSKKGRRWAAMEDAMAADGKSVLQGRYELGRVLGHGNFGRVHAARDLRTGRSVAVKVVAKDKLERAGMAEQIKREIAVMKMVSHPNIVELHEVMATRSKIYLALELVRGGELFSRIARAGRVREDVARCYFRQLVAAVDFCHGRGVFHRDLKLENLLLDEVGNLKVADFGLSALAGHARSDGLLHTACGTPSYVAPEVLGGKGYDGAKADLWSCGVILYVLLVGSLPFHEDNLMVMYRKMQRGEFLCPPWVSADARKLIGELLDPDPSTRITVARLVETPWYRKPLPVLPPLNLKEPTPDARRATSDKEEPEVLNAFHLISFSEGFDLSPLFDQGRGGGVGRSSAGGIRFVTREAASSVVSRLESLVTGRGANMRVTKSGSRGVRLEAVSRGRSGARLAVAAEIFSVAPSVLLVDVKKDGGDTMEYRSFCSEELRPALKDIVWASSQDTPGAA

SEQ ID NO: 51847 - protein, 379 aa, Lactococcus lactis subsp. lactis Il1403
MIEENLYQELVEIRHYLHAHPEISEKEVETTKFIRQKLADWQIEIMDSQLKTGLVAKIGSGKPIIALRADIDALPILEETGLEFSSVNKGAMHACGHDLHMTSLLGAAKILKEKESQFSGTIKIIFQPAEEIGEGSKEVLKTGLVSDVQAFIGYHNMPTLSAGVIGLREGGVMAAVERFEILIRGQGSHAAYPQEGQDLILASAAIVQNLQQIVSRNISPLRAAVVSVTHIEAGNTWNVLPNNARLEGTIRTFDNEVRSLTKRRFSQIIEATAKAYDVELEIKWLMEADLTFNDFELTDVIRKRTEQWHDKVVYPEPSTAGEDFANYQKQAPSVFAFIGSNEQGGSGLHFADMVVQDETLKVAVDYYLESAHQLLEHFK

SEQ ID NO: 51848 - protein, 161 aa, Cichorium intybus x Cichorium endivia
MGFSEKQEALVKESWEVMKQDIPALSLYLYAMILEIAPEARGLFSFLKDTNVIPQNNPKLKSHAVKVFKMVCESAIQLREKGEVVVSGSTLKYLGSVHLEKGIVDPQFEVVKEALIRTVAKAMGEKCSEEMKSAWSEAYDELADAIKTEMKKEAAETQTHI

SEQ ID NO: 51849 - protein, 211 aa, Burkholderia fungorum LB400
MQEIIEGFIRFQREVFPQQSGLFKRLSTAQSPSTLFVTCSDSRVVPELLTQTEPGSLFVIRNAGNIVPSYGPEPGGVSATVEYAVAVLRVRDIVICGHSNCGAMTAISTCMNLDHLPAVAGWLRHADAAKAINASRTYHSDAECLEALVKDNVIAQLANIRTHPSVAVGLANKTLQLHGWIFDIESGVMLALDGRTGKFLPLVDNPDIYAV

SEQ ID NO: 51850 - protein, 508 aa, Oryza sativa
MMAEALREVLPLPYFPGQPCWYLQERRGAEAWSAEENKVFERALAQVDLDSPNRWEMVAAMLPRKTVIDVMNHYRDLENDVGSIEAGLVPFPHYSSSLSPASSGFTLQDWDGSDGGFRRGCYLKRGRAPDQERKKGVPWTEEEHKSFLMGLKKYGRGDWRNISRYFVTSRTPTQVASHAQKYFIRLNSGGKDKRRSSIHDITTVNLPEEDTSNPSPSPPSVLTTASDQLGSLVDTKPVPPPPSLGAQRHFMSPLPGALGVSHHPYGNVKLEPNASFLAGGDAMRTLVTAVLSGGEPHKEEHRAPPPIISTGTTRLRPSRSPVSVCDWLASWLQSCFMRLRIAKYWTEGPLTGYCFDQEHQGFPRKRKRKALLDRCDYTIHCMNLSLDCLFGKPHRPASAGGQCISTPTPSAIPIPDRMHGEIGDHRPEIKWHRCYCRFVLCSSDFCSCEVEESASTGGGALLSSICSAIGHGRESESIIDAIALLGRHVRPRLRANIQILQMDDIIEE

SEQ ID NO: 51851 - protein, 396 aa, Moorella thermoacetica ATCC 39073
MVSAGDLRAAAEALKPQLVAWRRRLHQYPELSFEERETSAMVAGVLRELGLQVRSGIGGTGVVGVLAGAGEGPGVALRADMDALPLQEDTGEEFASRYPGRMHGCGHDAHMTMVLGAATILAERRQELPGPVVFIFQPGEELPPGGASRMLAAGVLDDPPVKAAFGLHVTAYLPVGTVGVRSGAIMASADNFTIKIKGRTSHGASPHLGADAIVAAAQAVLALQTIISRHLDPVQPAVLTVGTIKGGEKENIVAGEVTLTGTTRALNNVMRQQLEKDMRQVLAGVAAASGTEIDLDYLWGYPPLVNNAGLTELFRRVAGEILGPDKVLELANPSMGAEDFARYAEKVPAVYFNLGAAIPGAEPHPWHHPRFNINEDCLPIGAGLLAALAVRTLEDF

SEQ ID NO: 51852 - protein, 212 aa, Oceanobacillus iheyensis HTE831
MVKTILFDFDGTIANTLPLCFEAFRTVFKEFDQVILTNDEIKEMFGPSETEIIQLNVKHPDKLQAIERFYEVYETLHPSYVKPMEDLHNLLDELDGNGINLGIVTGKAKRSLDISLQQLNIRSNFAVVITGDDVTNPKPHGEGVILAMQELSVTPEEVLFVGDSEADILAGKEANVTTVGVHWSEEVQSADFNTKPDYYLTSIEQFYVELLP

SEQ ID NO: 51853 - protein, 430 aa, Desulfitobacterium hafniense DCB-2
MGFQDQRSKEAFARANGVLPGGVNSPVRAFKSVGREPIFIAKGQGARLWDIDGNSYLDYVLSWGPLILGHAHPVVVGAIKAAAERGTSYGAPTEIETECAEEVIKAFPSMEMVRMVSSGTEATMSALRLARGVTGRNKIIKFEGCYHGHGDSLLIKAGSGALTFGVPTSPGVPSSVASQTIVAQYNDLEGLKEIFKECGEDIAAVILEPVTGNMGVVLPQPGFLAGLRTLTQDYGSLLIFDEVMTGFRVSYGGAQGRYQIDPDLTCLGKVIGGGLPVAAYGGKRKYMEQVAPSGPIYQAGTLSGNPLAMAAGLATLKLLQQEGVYEGLEKKTARLAEGLQSIAQELGFPIWVNSVGAMFSAFFTDQPVIDFKSACSSDVERFGSFFRGMLERGIYLAPSQYEAVFLSAAHTDADIDYTLEQARDVLKSLG

SEQ ID NO: 51854 - protein, 427 aa, Salmonella enterica subsp. enterica serovar Paratyphi A str.
MADTKAKITLTGDTAIELDVLKGTLGQDVIDIRSLGSKGIFTFDPGFTSTASCESKITFIDGDEGILLHRGFPIDQLATDSNYLEVCYILLYGEKPTQEEYDEFRTTVTRHTMIHEQITRLFHAFRRDSHPMAVMCGITGALAAFYHDSLDVNNPRHREIAAFRLLSKMPTMAAMCYKYSIGQPFVYPRNDLSYAGNFLNMMFSTPCETYEVNPVLERAMDRILILHADHEQNASTSTVRTAGSSGANPFACIAAGIASLWGPAHGGANEAALKMLEEISSVKHIPEFVRRAKDKNDSFRLMGFGHRVYKNHDPRATVMRETCHEVLKELGTKDDLLEVAMELEHIALNDPYFIEKKLYPNVDFYSGIILKAMGIPSSMFTVIFAIARTVGWIAHWNEMHTDGMKIARPRQLYTGYDKRDFKSALKR

SEQ ID NO: 51855 - protein, 402 aa, Oryza sativa (japonica cultivar-group)
MGSVERITSMPRRQVQARDGSVASLAKRTGSPCQQEDDYEGAKTMTNPWTFLPEDIWYHIHSLLPLKDAARTACVSHTFLRSWRYRPNLVFSDAKLGLSGLSESDEVTKELNEKVDLIMKNHSGIGLRTFGLEYYNLVDASYLDRWLQIAVTPAIEELILMFFPEIKAKYYDFPFSLLFDRGGNSIKHLRLSYCAFRPTTSLNFLQRLHLFEVRITGDELGCLLSNSFALEQLKLTHCKELNYLKIPCVLQRLSKLTVFGCTTLQVIEIKAPNLSTFDYDGNLAGLSDGGLLPVKNLHLSSFYQHHTIQYTCAKLPSVAPTIETLTIFSESERFNTQISPFRFLHLKCLTISLSIYRGGFSPSNDYLSLAYFLDASPVLEIFTLTVSISFFMFFLLFDTIKF

SEQ ID NO: 51856 - protein, 767 aa, Pyrus communis
MAVLLSTLATEIVIPVAAVVGIVFSLVQWFLVSLVKVTPERNAPPSGPNSNKNGCNDYLIEEEEGLNDQNVVVKCAEIQNAISEGSTSFLFTMYQYVGVFMVVFAILIFLFLGSVEGFSTKSQPCTYDAAKTCKPALATAIFSTVAFVLGGITSVLSGFLGMKIATYANARTTLEARKGVGKAFITAFRSGAVMGFLLAANGLLVLFITINLFKLYYGDDWEGLFESITGYGLGGSSMALFGRVGGGIYTKAADVGADLVGKVERNIPEDDPRNPAVIADNVGDNVGDIAGMGSDLFGSYAESSCAALVVASISSFGINHEFTPMLYPLLISSVGIIVCLITTLFATDFFEIKAVKEIEPALKKQLIISTVLMTIGIAIVSWIALPSSFTIFNFGVQKVVKNWQLFLCVAVGLWAGLIIGFVTEYYTSNAYSPVQDVADSCRTGAATNVIFGLALGYKSVIIPIFAIAVSIYVSFSFAAMYGIAVAALGMLSTIATGLAIDAYGPISDNAGGIAEMAGMSHRIRERTDALDAAGNTTAAIGKGFAIGSAALVSLALFGAFVSRAAISTVDVLTPKVFIGLIVGAMLPYWFSAMTMKSVGSAALKMVEEVRRQFNTIPGLMEGTAKPDYATCVKISTDASIKEMIPPGALVILTPLIVGTFFGVETLSGVLAGSLVSGVQIAISASNTGGAWDNAKKYIEAGASEHARTLGPKGSDPHKAAVIGDTIGDPLKDTSGPSLNILIKLMAVESLVFAPFFATHGGLLFKIF

SEQ ID NO: 51857 - protein, 257 aa, Triticum aestivum
  misc_feature (87)..(87): Xaa can be any naturally occurring amino acid
  misc_feature (112)..(112): Xaa can be any naturally occurring amino acid
  unsure (1)..(257): unsure at all Xaa locations
VTSRTSLYKKAVSYRSGIPGISSTHASAAIDSSSSSLLQKPTYHPPPPPPSNKMDAAVERLKTGFEKFKTEVYDKKPDFFEPLKAGXQAPKYMVFACADSRVCPSVTLGLEXPGEAFTIRNIANMVPSYCKNKYAGVGSAIEYAVCALKVEVIVVIGHSRCGGIKALLSLKDGADDSFHFVEDWVRIGFPAKKKVQTECASMPFDDQCTVLEKEAVNVSLQNLLTYPFVKEGVSNGTLKLVGGHYDFVSGKFETWEQ

SEQ ID NO: 51858 - protein, 350 aa, Xanthomonas campestris pv. campestris str. ATCC 33913
MDVAVPALPLHCTFEAADWQRLAQHWHAVALSSEVSEAPFKAMLLDEPLVLYRLGAELVAARDVCPHRGVPLSMGSADGAGVVCAYHGLRFGAGGRCNHIPASPNQNIPAKMRLHTYAVAERYGLIWVCLAKPAGVSAAEVQIPPMPGWDEDGFQQIVCPGFDIAGSAARQLEGFIDVAHFAFVHTATFAQPDKREVPAYTTTETPTGFNADYLSSVANYSVDMPLPDVDPGFQWLRHFEVHLPFTATLTIHFPVPGKRLVIMNAASPVSKHKTRLLVPIARNFDTHLPVEDVHAFNLRVFEEDRAMVEAQRPEYLPLDPLLEVHIPADRSSIAYRRGLRSQGYSDFFLR

SEQ ID NO: 51859 - protein, 309 aa, Arabidopsis thaliana
MEITLNSGFKMPIVGLGVWRMEKEGIRDLILNAIKIGYRHLDCAADYRNETEVGDALTEAFKTGLVKREDLFITTKLWNSDHGHVIEACKDSLKKLQLDYLDLFLVHFPVATKHTGVGTTDSALGDDGVLDIDTTISLETTWHDMEKLVSMGLVRSIGISNYDVFLTRDCLAYSKIKPAVNQIETHPYFQRDSLVKFCQKHGICVTAHTPLGGATANAEWFGTVSCLDDPVLKDVAEKYKETVAQVVLRWGIQRKTVVIPKTSKPARLEENFQVFDFELSKEDMEVIKSMERKYRTNQPAKFWNIDLYA

SEQ ID NO: 51860 - protein, 640 aa, Oryza sativa (indica cultivar-group)
MQNSIVFVLTEVVMPGVSGISLLSRIMNPQYFARIFPVIMMSSNDAMGTVFKCLSKGAVDFLVKPIRKNELKNLWQHVWRRCHSSSGSGSESGIQTQKCAKSKSGDESNNNSGSNDDDDDDGVIMGLNARDGSDNGSGTQAQSSWTKRAVEIDSPQAMSPDQLADPPDSTCAQVIHLKSDICSNRWLPCTSNKNSKKQKETNDDFKGKDLEIGSPRNLNTAYQSSPNERSIKPTDRRNEYPLQNNSKEAAMENLEESSVRAADLIGSMAKNMDAQQAARATNAPNCSSKVPEGKDKNRDNIMPSLELSLKRSRSTGDDANAIQEEQRNVLRRSDLSAFTRYHTPVASNQGGTGFVGSCSPHDNISEAMKTDSAYNMKSNSDAAPIKQGSNGSSNNNDMGSTTKNVVTKPSTNKERVMSPSAVKANGHTSAFHPAQHWTSPANTTGKEKTDEVANNAAKRAQPGEVQSNLVQHPRPILHYVHFDVSRENGGSGAPQCGSSNVFDPPVEGHAANYGVNGSNSGSNNGSNGQNGSTTAVNAERPNMEIANGTINKSGPGGGNGSGSGSGNDMYLKRFTQREHRVAAVIKFRQKRKERNFGKKVRYQSRKRLAEQRPRVRGQFVRQAVQDQQQQGGGREAAADR

SEQ ID NO: 51861 - protein, 99 aa, Glycine max
  misc_feature (10)..(10): Xaa can be any naturally occurring amino acid
  misc_feature (41)..(41): Xaa can be any naturally occurring amino acid
  unsure (1)..(99): unsure at all Xaa locations
SGPTPWSTPXPKESPKGCLFYWTPPPPGQSPQWEDWGLPCXVPSFLPIVILGVGLNAKPDFPIETWAPQKAPQPPKIENSLAAAPTNNNREWSSSPESG

SEQ ID NO: 51862 - protein, 317 aa, Oryza sativa
MGRAPCCEKVGLRRGRWTKEEDEKLARYIRENGEGAWRSMPKNAGLLRCGKSCRLRWINYLRADLKRGNISPQEEDIILNLHATLGNRWSLIAGHLPGRTDNEIKNYWNSHLSRKGYEFLRGGGGGAVVDVDLSKLPGGGKRRGGRTGRSSSGKEKTRTKEKDKAPAPEAAHNDDGGGGGGGGIDNVSAASHSHREEQAQASASGLTSDGLEEGPLGLSEEMVSGPVGPVSPKPEVGQDGSSAESGCCGPSGSSGPTEAVGQDMGDKSMDWDLVGLDDGFANDDMWGSLSWDYGELVGPDGVHQGEVLSDLFFLGNL

SEQ ID NO: 51863 - protein, 497 aa, Chlamydia trachomatis D/UW-3/CX
MMKRLLCVLLSTSVFSSPMLGYSASKKDSKADICLAVSSGDQEVSQEDLLKEVSRGFSRVAAKATPGVVYIENFPKTGNQAIASPGNKRGFQENPFDYFNDEFFNRFFGLPSHREQQRPQQRDAVRGTGFIVSEDGYVVTNHHVVEDAGKIHVTLHDGQKYTAKIVGLDPKTDLAVIKIQAEKLPFLTFGNSDQLQIGDWAIAIGNPFGLQATVTVGVISAKGRNQLHIVDFEDFIQTDAAINPGNSGGPLLNINGQVIGVNTAIVSGSGGYIGIGFAIPSLMAKRVIDQLISDGQVTRGFLGVTLQPIDSELATCYKLEKVYGALVTDVVKGSPAEKAGLRQEDVIVAYNGKEVESLSALRNAISLMMPGTRVVLKIVREGKTIEIPVTVTQIPTEDGVSALQKMGVRVQNITPEICKKLGLAADTRGILVVAVEAGSPAASAGVAPGQLILAVNRQRVASVEELNQVLKNSKGENVLLMVSQGDVVRFIVLKSDE

SEQ ID NO: 51864 - protein, 675 aa, Magnaporthe grisea 70-15
MTYKRKVSLRGVGYLGGMKLNTALGTAASLGRLRPRIGPSITAPSVIQWTCASCRSQSSVAGARAAAGFAVGNGGRRTVVSSIRSITSSRYYRHASTTSQSQSRSEYQQQQQQQGGSRRPRGSGALLLATTGGAASVGILAFTDDIKAGYETVERCGRVGLALAVCINDYRSTLKKRDGLEDGEEQEKLLSECHKRCAVRTLKSGLKDGKQLADISDHQSAMNYLLPVEWTTTFIPLQDRCPVSSFESIQAMYRADTGNELWDDFSEFSSEPIGAASLAQVHLATLKADGRRVAVKVQHPGLAQWAPLDLALTRYTFQTLKTFFPEYDLSWLSDEMDLSLPQELDFRQEAHNANRTREYFSAHPELPLIIPDVIKADRRILIMANESGHRLDDLEYLDGQGIDRDEVSAALARIFNEMIFGDGAPLHCDPHGGNIAIRKREGGRGVSGGGSNFEVILYDHGLYRDIPLDLRRSYAKMWLAVVEGDMDRMRKYAHEVAGVTDESFPLFASAITGRDFGVLASSSSGGDGSVLLAPRSLDEKQTMGSALQGGLLADLVQLLGKVPRIILLILKTNDLTRSLDENLHTRQGPVRSFLILARYCTRTVFLERLETLRERGSLFWPPNAVGLLAAWVGYLKVEVQLEAFEMWLSVKRCVVSPVLELVRRSRREEGAVVAL

SEQ ID NO: 51865 - protein, 428 aa, Corynebacterium diphtheriae NCTC 13129
MSTASWGWTLHGDGKTIAPGAVVAPEERLSWSRTIGIGMQHVIAMFGATLLVPTLTGFPVNTTLLFSGISTMVFLLITRNRLPSYLGSSFGFIAPLMASQGEGIGVQLGGVVATGLALILVGFIVKSAGRKVIDLVMPPAVTGAIVALIGLNLAPSAAGNFQSQPLVAVVTLASILLFTVAGRGMVARLGILIGVIIGWVFAAITGNLAEGASDSVREAAWIGFPQFHTPEFTTHAILVTLPVVIVLIAENVGHVKAVSEMTGRNLDDLAGDALIADGIGTTFAGAFGGSGTTTYAENIGVMAATKVYSTAAYWVAALTAVVLAFIPKFGALIFTIPTGVLGGAALVLYGLIGMLGVRIWQDNKVNFNNPVNLTAAAVALIAGIGNLTLVIGGIELQGIAWGSMGIIVFYPVLKWLYLRVGEGNNARF

SEQ ID NO: 51866 - protein, 431 aa, SYNECHOCOCCUS SP. WH 8102
MKRVLAIILGGGAGTRLYPLTKMRAKPAVPLAGKYRLIDIPISNCINSNINKMYVMTQFNSASLNRHLSQTFNLSASFGQGFVEVLAAQQTPDSPSWFEGTADAVRKYQWLFQEWDVDEYLILSGDQLYRMDYSLFVEHHRSTGADLTVAALPVDPKQAEAFGLMRTDGDGDIKEFREKPKGDSLLEMAVDTSRFGLSANSAKERPYLASMGIYVFSRDTLFDLLDSNPGYKDFGKEVIPEALKRGDKLKSYVFDDYWEDIGTIGAFYEANLALTQQPTPPFSFYDEKFPIYTRPRYLPPSKLVDAQITNSIVGEGSILKSCSIHHCVLGVRSRIETDVVLQDTLVMGADFFESSDERAVLRERGGIPVGVGQGTTVKRAILDKNARIGSNVTIVNKDHVEEADRSDQGFYIRNGIVVVVKNATIQDGTVI

SEQ ID NO: 51867 - protein, 237 aa, SYNECHOCOCCUS SP. WH 8102
MTYYRIERASDAESLARMASDTIAAQISLVLDQSDCCSIALSGGSTPARAYSFLGQDHLPWDRVDVFLGDERWVAADDDSSNARMLRRTLLADGPGRAARFHAVPTVELADAESSAAAFGDLVAQHCPGEPPVFDLMLLGLGDDGHTASLFPGTEAPTITDRWATVGRGKGLDRITLTAPVLSAARQVIFLVSGAGKQEALRRLVDPSESSERTPARLVQPASDVLILADQDATASL

SEQ ID NO: 51868 - protein, 397 aa, Methanosarcina barkeri str. fusaro
MKAVVLVAGKGTRMEPLTSGCPKVMLQVANKPILEHILNSAIEAGIEGFVFITGYLEKQIKEYFGDGNKWGVSIEYVQQKEQLGTANAIGCAKGYVDGTFLVLNGDMLIEQEDLKALVSRTEEAVICVKEVENPADFGVLETENNRVVRIIEKPKNPPTNLANAGIYLFRESIFDFIDRTKASVRNEFEITDSIQMLIDSGTAVGYSPLEGRWIDIGYPWDLLKANEYLLKGLKSSCEGTVEPNATIKGEVVIGKGTIIRNGSYIEGPVVIGENCDIGPNCFIRPSTAIGNHIRVGNAVEIKNTIVMEDTHVGHLSYVGDSIIGHHCNFGAGTKVANLRHDGKNIKVMIKSRILDTGRRKLGVIMGDDVHTGINTSINIGTIMEKGRYTYPGEIVKH

SEQ ID NO: 51869 - protein, 348 aa, Listeria monocytogenes EGD-e
MKALKLYGKRDLRYEEADMPTIEEPDDVILKVKTVGICGSDISRYSKLGPYVPGMVWGHEFSGEVIEVGSEVTDIEIGDRAAGCPALYCGECEYCKKGEFARCRKLTVIGARHPGAYAEYIKLPAENVVKIPNELDYEAAALVEPSAVVVHGFYHTKLQAGDDVVVVGSGNIGLLAIQWAKVFGARRVIAIDVDDKKLALAKEVGADVVINSLKEDPLEVVAAHTDGLNADLVVEAAGSPITSAQVFAYAKKGGGVVFLGIPYADVTIERFYFEKIVRSELTVWGSWNAISAPFPGKEWQTTIHFLANKQINIEPMITHRLSLAEGPEVFERIYERNEFFGKVLFFPE

SEQ ID NO: 51870 - protein, 124 aa, Arabidopsis thaliana
SGPGFTGSEVYLAVAAAELLKKDGVNVQVVSMPCYDLFDEQSAEYKKQVFPARALVVSIEAAGIHGWERYSHYQIGMRSFGASAPFKQLYTRFGFDPDQIAAKSKEVINFYKGKPIAWLVDRLE

SEQ ID NO: 51871 - protein, 314 aa, ASPERGILLUS NIDULANS FGSC A4
MSLADTTYKLNTGAEIPALGLGTWQSAPGEVSAAVYHALKVGYRHIDAAQCYGNETEVGEGIKRALSEGIVKRSEIFVTTKLWCTYHTRIQQALDLSLSKLGLDYVDLYLVHWPLAMNPNGNHDLFPKLPDGSRDLVREHSHVTTWKGMEELITNNPDKVKAIGVSNYSKRYLEQLLPQAKIVPAVNQIENHPALPQQEIVDLCKEKGILITAYSPLGSTGSPLFKAEAIVAVAERRGVTPASVLLSWHLARGSSVLAKSVTPSRIEENRKLVKLEPEDVELIGKYSAELAATNGFQRYVYPPFGVDFGFPDKS

SEQ ID NO: 51872 - protein, 808 aa, Arabidopsis thaliana
MANAERMITRVHSQRERLNETLVSERNEVLALLSRVEAKGKGILQQNQIIAEFEALPEQTRKKLEGGPFFDLLKSTQEAIVLPPWVALAVRPRPGVWEYLRVNLHALVVEELQPAEFLHFKEELVDGVKNGNFTLELDFEPFNASIPRPTLHKYIGNGVDFLNRHLSAKLFHDKESLLPLLKFLRLHSHQGKNLMLSEKIQNLNTLQHTLRKAEEYLAELKSETLYEEFEAKFEEIGLERGWGDNAERVLDMIRLLLDLLEAPDPCTLETFLGRVPMVFNVVILSPHGYFAQDNVLGYPDTGGQVVYILDQVRALEIEMLQRIKQQGLNIKPRILILTRLLPDAVGTTCGERLERVYDSEYCDILRVPFRTEKGIVRKWISRFEVWPYLETYTEDAAVELSKELNGKPDLIIGNYSDGNLVASLLAHKLGVTQCTIAHALEKTKYPDSDIYWKKLDDKYHFSCQFTADIFAMNHTDFIITSTFQEIAGSKETVGQYESHTAFTLPGLYRVVHGIDVFDPKFNIVSPGADMSIYFPYTEEKRRLTKFHSEIEELLYSDVENKEHLCVLKDKKKPILFTMARLDRVKNLSGLVEWYGKNTRLRELANLVVVGGDRRKESKDNEEKAEMKKMYDLIEEYKLNGQFRWISSQMDRVRNGELYRYICDTKGAFVQPALYEAFGLTVVEAMTCGLPTFATCKGGPAEIIVHGKSGFHIDPYHGDQAADTLADFFTKCKEDPSHWDEISMGGLQRIQEKYTWQIYSQRLLTLTGVYGFWKHVSNLDRLESRRYLEMFYALKYRPLAQAVPLAHEE

SEQ ID NO: 51873 - protein, 100 aa, Plantago major
FLGLSVPQYFNEYTAINAYGPVHTSARWFNDMVNVPFSSEAFVAGLLAYFLDNTMHKKEAQIRKDRGKHWWDKFKSYKTDARSEEFYSLPFNLNKYFPSV

SEQ ID NO: 51874 - protein, 367 aa, Methylococcus capsulatus str. Bath
MTFTSIRRHRPPIHTLPNQVSPIRFIPEWEKQSAVLIAWPPGHGDFAPWLDQVEQTYAAIAAALSQRETLLIACLDAAHERRIGDILANTGADKNRIVFIRIPYDDIWVRDTAPLSRLHEGRPELLDFRFNGWGGKYECSDDAALAARLVATGIFGRTPRVQVDFVLEGGSVETDGLGTVLTTSRCLLNPNRNPGYSRAEIEDCLARTLGADRILWLDHGQAEGDDTDAHVDTLARFCSEHTIAYTACDDTSDPHHAPLKAMEGQLQDLKQRDGRPYTLVPLPIPKPIRNEQGQRLPATYANFLIVNDAVLVPVYADPADSVAIERLAPCFPDREIVPIHCTPLIRQYGSLHCMSMQFPEAVGVSRP

SEQ ID NO: 51875 - protein, 413 aa, Arabidopsis thaliana
MTLTISDLPRDLKKKIFSRIPLRYVRALRLTCKEWETLIKSRSLKIDEEESQMVALMDYNLCLMSKSFNGGDPSTEIKGKLTCFDEQVKVSMLFHCEGLLLCILKDDNTKVVVWNPYLGQRRFIQVRFSHIPGGWDQFSYALGYYKNNNMMKSFKLLRFFDYFYTSNDFVFYEIYDFDSGLWKTLDVTPYWRIRFFDDIGVSLKGNTYWCAKERKPEWNADPFIIVDHIICFDFTSERFGPLVPLPFRAMKESLVTLSCVREEKLAALFCRDVVVEVWITTTIEFDKVSWSKFLTFGVRDCPMIYSCTGSFFIDEVNKVAVIFGQPLKRDKVFIIGEAGQVRDVDLGEPAHQDSWLYVCPYVPSLVKIKQPPGCKRRRQSSSENRRYKRNMMRLVELEKYHIAMEPKRGDKTI

SEQ ID NO: 51876 - protein, 332 aa, Plantago major
MAKDPVRVLVTGAAGQIGYALVPMIARGIMLGPDQPVILHMLDIAPAAEALNGVKMELVDAAFPLLKGVVATTDAVEACTGVNVAVMVGGFPRKEGMERKDVMSKNVSIYKSQASALEKHAAANCKVLVVANPANTNALILKEFAPSIPEKNITCLTRLDHNRALGQVSERLSVQVSDVKNCIIWGNHSSSQYPDVNHATVKTPAGDKPVRELVADDQWLNTEFISTVQQRGAAIIKARKFSSALSAASSACDHIRDWVLGTPEGTWVSMGVYSDGSYNVPAGLIYSFPVTCKNGEWSIVQGLPIDEFSRKKLDLTAQELSEEKELAYSCLS

SEQ ID NO: 51877 - protein, 309 aa, Methanopyrus kandleri AV19
MILVTGGAGFIGSHVVEELVDRGHDVVVLDNFSVGCEENLREVRDDIEIVRADVTDPRAVERTFREYRPEAVIHLAAQVNVRYSMESPFVDARINALGTLNLVSLAAEHDVERFVYASSGGAVYGEPEYLPVDEEHPTRPISNYGVSKLAGEYYVRVYAERDGFEYVILRYANVYGPRQDPRGEAGVIPIFLLRAARGEPLTIFGDGEQTRDFVFVEDVARVTAEAVERGDGVYNIGTGRETSVNDIVNAVKAVTGVDVEVVYEDPRPGEVRRIYLDPSRAREELGFEPRVDLEEGIERTWEWIRRKIA

SEQ ID NO: 51878 - protein, 285 aa, Bordetella bronchiseptica RB50
MTTTDRIAAAFARVSEAGRAAALIPYIAAGDPSPQATVPLMHALVRAGADLVELGVPFSDPMADGPVVQRAAERAIAQGVGLRRVLELVADFRRDDSVTPVVLMGYANPIERMGQRAFAQAAQAAGVDGVLVVDYPPEEVDEFAAMLAEAGVAPIFLLAPTSTEARIEAIGRVARGYVYYVSLKGVTGAGSLDTDDVARKLALIRRHVHIPVGVGFGIRDAASAQRIAAHADAVVIGSKLIETMEQAGAQAGADQKNEAAIAAAQQWLHTIRLALDDVKRENAPA

SEQ ID NO: 51879 - protein, 409 aa, Triticum aestivum
TRPTHASEKEGVMLIKKTAENIDEAAKELPDANLRPEDLWANHSKVVLPKPHMKDSASWRAVQKVREGGENIDLKHFRPVKPLGSGDTGSVHLVELLNTGEYFAMKAMDKNVMLNRNKVHRATAERQILDMLDHPFLPTLYASFQTKTHICLITDYYPGGELFLLLDRQPQKVLREDAVRFYAAEVVIALEYLHCQGIIYRDLKPENILLHRDGHISLTDFDLSCLTSCRPQVFLPEEGNKKSRRKSRSSPIFFAEPMRASNSFVGTEEYIAPEIITGAGHTSAVDWWALGILLYEMLYGYTPFRGKTRQRTFANILHKDIRFPASVSVSLPARQLIYRLLHRDPANRMGSYEGSNEIKQHPFFRGINWALVRGTAPPKMDAPLFSDDVGKGMGDAAATAAADNHTDMF

SEQ ID NO: 51880 - protein, 533 aa, Burkholderia fungorum LB400
MGAALPLNVLLVASEALPLAKSGGLGDMVSAYAAALRDAGVDVSILMPAYPAALERAVDVTPVARMTGLPGGDARLLRGHMPDTGVPVLLLQMDHLFAREGLYRDPQGRDYLDNLTRFASLAAAAARVARGVRNVKRPDIVHAHDWHAGLTPLYLRLAGVAARSVFTIHNLAFQGNHPLAMGGWIGVPPELLAPALSDERSIEFYGSLSMMKAGIVHADRVTTVSRRYAREILTPRFGHGMEGVLQAQAAKLSGIVNGIDSAVWNPATDKHIARPYSVDDTAGKQACKRDLQQAFGLTRDPFAPLVAIGSRLTEQKLADVVVHTLPALLERHPRLQFAILGQGEQGIEQALQGIAAAWPGRVGVQIGYDERRAHMLHAGADILLHGSRFEPCGLTQLYAMRYGTIPVASRVGGLADTIVDYLPHDPRGDRKATGFLFDGETPDDVMHALGRALDAFVEPSSWHVLQRNAMSRDFGWATSTSNYLSLYAELVDARPAQRDTRVRKTPVRARGAAAAGSRREEFNAGLGKMARSA

SEQ ID NO: 51881 - protein, 94 aa, Brassica napus
SRRRFRHFHQRQHLAKGPCVVLQKLWSCIVPSRRESRNKINQNGVSSPEHEHRDVEEAGANEDEDTGAQVAPIVRLEEVAVTTGEEDEDAVLDL

SEQ ID NO: 51882 - protein, 407 aa, Streptococcus pyogenes M49 591
MPSMKHILKSLSILLIGFLGGLIAIITFNNLYPHSPSKINSGKATTSNMVFNNTTNTTKAVKAVQNAVVSVINYQDNPSSTLSNPYTKLFGEGRSKENKDAELSIFSEGSGVIYRKDGNSAYVVTNNHVIDGAKRIEILMADGSKVVGELVGADTYSDLAVVKISSDKIKTVAEFADSTKLNVGEVAIAIGSPLGTQYANSVTQGIVSSLSRTVTLKNENGETVSTNAIQTDAAINPGNSGGPLINIEGQVIGINSSKISSTPTGSNGNSGAVEGIGFAIPSTDVIKIIKQLETNGEVIRPALGISMVNLNDLSTNALSQINIPTSVTGGIVVAEVKEGMPASGKLAQYDVITEIDGKTVNSISDLQSSLYGHDINDTIKVTFYRGTTKKKADIKLTKTTQDLTKTQ

SEQ ID NO: 51883 - protein, 98 aa, Neorickettsia helminthoeca
MNIGLKMLHDQVLIKPQEEQDGASGIYIPDSAKKKPTIGVVVAVGQGAKNSNGTFDPVCVKEGDVVLYRKWAGSEVEHDGVEYVVMKESDIIAVKEGK

SEQ ID NO: 51884 - protein, 473 aa, Salmonella enterica subsp. enterica serovar Paratyphi A str.
MPTHLVWFRRDLRLQDNLALAAACRDASARVLALYISTPAQWQAHDMAPRQAAFISAQLNALQTALAEKGIPLLFHEVADFNASIETVKNVCRQHDVSHLFYNYQYEFNERQRDAAVEKTLPSVICEGFDDSVILAPGAVMTGNHEMYKVFTPFKNAWLKRLKEDIPPCVPAPKIRVSGALSIPLTPVSLNYPQQAFDAALFPVEENAVIAQLRHFCSQGADEYASRRDFPAVDGTSRLSASLATGGLSPRQCLHRLLAEQPQALDGGPGSVWLNELIWREFYRHLMTWYPALCKHQPFIRWTKRVAWQENPHYFQAWQKGETGYPIVDAAMRQLNATGWMHNRLRMITASFLVKDLLIDWWLGERYFMSQLIDGDLAANNGGWQWAASTGTDAAPYFRIFNPTTQGERFDRDGEFIRQWLPALRDIPGKAIHEPWRWAEKAGVVLDYPRPIVEHKQARIATLSAYEAARKGA

SEQ ID NO: 51885 - protein, 533 aa, Neorickettsia helminthoeca
MPNEVISGEQLQKVIREAADLVVSSAGVTLGPEGRPVIMSKSYGGPEVTKDGYKVINALKPEDEKVAKIVELLNQATSQANEKAGDGTTTATMLVGNMIKNAHKHIAAQRSRMKLKAGMKRARDAVVKHIQSIAKKIDSEEEIAQVASISANGNSEIGNKIAEAMNKVGKEGVITVEEGKGLEEFSVSVVKGMVFDRGYVSPYFITNSEKMIVEFDNPYILIANKKLSSIQPMVSLLETIVRSNRAVVIIAEDVEGEALTSLVLSKMRGSLKACAVKAPGFGDRRAEMLEDIRILTGARSLVSDDIGVTVESLTVEDLGTAKSIIISKDSTTIVDGNGSKDAISARVNQIKTQIEKTTSDYDKEKLQERLAKLAGGVAVLKVGGATEVEVKERKDRVEDALHATRAAVEEGIVPGGGATLLNAIKVLEELSSDDDDEQAGINIVKAALKAPISQIVENAGEDASVIVHNLLESKDINRIFDARKLQYVDAFKAGIIDPAKVVRVALESAVSVASVLVTTEALIVDLPTKDNAG

SEQ ID NO: 51886 - protein, 319 aa, Oceanobacillus iheyensis HTE831
MSKQTEIATFAGGCFWCMVEPFDQRPGVIDIRSGYTGGHVENPTYEQVCTNTTGHVEAVQITFDPEIMPYKELVETFWQQIDPTDAGGQFNDRGESYQTAIFYHTEEQKKIAEDSKKALDESNRFKMPIVTPVLPAKPFYEAEEGHQDYYKKRSFHYRMYKKGSGRQDFIKNNWQNTIDKNELKEKLTPIQYHVTQENGTERPFDNEYWNNTQEGIYVDIIKGNVLFSSKEQYDAGCGWPSFTKPVDPYQIEDKVDKTHGMVRTEIRSKQSDSHLGHVFEDGPQDKGGLRYCMNSAAMRFIPKEKMEEEGYSKYLYLFN

SEQ ID NO: 51887 - protein, 369 aa, ASPERGILLUS NIDULANS FGSC A4
MANVHHISVPSKVLFQKARKLVPPMLEKFHKGQQGRVAVIGGSLDYTGAPYFSAMASARLGCDLSHVICESSAATVIKSYSPNLMVHPILPSSASVKDPSSIDAPSLASPIIAMLGRLHALVIGPGLGRDGVTLKVVTEVMKEARSRSIPFVLDADGLLLVTENPDLVKGYKDCILTPNVNEFSRLAKALNIEVPSLAQISSKESGDKTSKEAEACEKLSQALGGVTIIQKGPHDVISNGVTSIVSDLPGGLKRSGGQGDTLTGSLGTLLAWRAAYHDALWDSGEQEHSKEAENKEEVQGELESNKRMSPSTTLLLAAWAGAAITRECSRRAFKAKGRSMQASDLTDEVHESFLTLIGEPEGSKVPERL

SEQ ID NO: 51888 - protein, 821 aa, Moorella thermoacetica ATCC 39073
MKAIIMAGGEGSRLRPLTCKRPKPLVPVANRPVMEYCVDLLRELGIKEVGVTLQYLPQLIEEYFGDGSDFGLHLHYFVEDKPLGTAGSVKNAAAILDETFVVVSGDALTDFDLRPAIARHKESGALATLVLTAVDNPLEYGVVITNPDGSIRSFLEKPSWGEVFSDRVNTGIYILEPEVLELIPEGRPFDFSKDLFPRLLKEKRPLYGVTLSGYWCDIGNLTQYRQAQEDILRGRVKVRVVGQDKGGGVVMGEGVEIAPGARIEGPVLIGGACHIATGAVVGPFTVLGPYTRVEEGATVRRSVLWDNVYTGEGANVRGAVVCSRASLQRRVQVYEGAVIGDGTQVDAGAEVRPEVKVWPEKTLGRETVVHESLIWGRGVARPLFVGSQAPGYLHGDLTPFQVTRLGMAYGASFPPGTTVGLSTFAGGAGEMLYKALAAGLMAAGVQVADLGRLLTPIHRFAVRSLGLDGGCHIKRDAAERDKVWLHLVNSRGHDLNPAAVRKIENLYWREDGRRVQEVPASIYFPGLEGAYRDWLLATLGDHGLKKRALRVALGGQGQVAGVAGTILQDAGAEVIRLDLDPAKTWQAVQEDLPYFAGEIRRYGADLGAALDSNGEELILFTGEGRRVAPAQQMTLLARVYLETHRGASLVLPVTAPRVLEQVAGGLHGRVERVKGHPGIYHEAMARADGETALGQQHLQLDALAALVHILDWLASREESLDSAVAALPPVYTASRTVACPWEAKGRVMRTLISEEPADGVELLDGVQVRHGKGWSLVLPDGETPHYHIYSEAFSQEAAEELAGFYEERLKELIAREKSKGR

SEQ ID NO: 51889 - protein, 159 aa, Plantago major
MLQRIGIGLVLSLVSIVYAAIIERKRLATAMEYGLVDMPKAVVPMSALWLAPQYVLSGVADVFTMIGLQEFFYDQIPCDLKSIGLAMYLSILGIGSLLSSFLVSFIQNMTKGHGQDGWFADNLNKAHLDYFYWLLAGLSTVGLSAYIYFARSYVYRRKV

SEQ ID NO: 51890 - protein, 145 aa, Glycine max
  misc_feature (13)..(13): Xaa can be any naturally occurring amino acid
  misc_feature (130)..(130): Xaa can be any naturally occurring amino acid
  unsure (1)..(145): unsure at all Xaa locations
MASLFSDNEQPPXNSNSISTVLVRKKKSLSASTGDGESHARWRSEKQQRIYSAKLIQALKQVRLSSSSSASTSSPTAQKRGKAVREAADRALAVSARGRTLWSRAILANRIKLKFRKQKRPRQTVVPAVXTVVTTGASSSRGRKP

SEQ ID NO: 51891 - protein, 590 aa, GIBBERELLA ZEAE PH-1
MAHEMSRDGEAVAEQTERPRSANEAVRKLWTTKTLGIAIGCLLLMNFFMNLTVYTQNVYEPYATSHFKAHSLLATGSIVAGIMRIVSYPLLAKLANHFGRPQGFAGGALAMAIGNAMYASCRNVDTFLAGSIFDVLGDSAWNIMQQIFIADITTLVNRGILFTLPESLTAIPTLYGGTYLGEHILLNSSWRWGFGMWSIILPVTAIPTIGIMIWMNRRAKKTGLLSEKVSFMHGAAPGPVGKVKHVGSQLDLIGALLLVAGLAMLLLPFTIAGRNNTDRWSRPSSIVLVIIGFLTFVGFLVWDGKFASNPIIPYRTIREHNVVIACASVIIIAMSDSIYRPFLSSFLQVAGHYSPGAATRVDNAQRVAYNVGALAAGLSLKFIKNTKPLVMFGVVCIILAAGLPIYLTNISGTHIASEAAFITAKSLLGVGRGFTQVPLQVSLQAVLEHEQVAIATAVYLSSLGFGSNLGVTVSGAIWNSLLPRKLIAYFGKEEGRKIFGSIVVARGYEAGSADRDAIDTCYRQTQQTLAIGSVCVSGLLLVMVYLVHNVKLGDEDEKRAEKADQELAWAIKQKETEGEGPIDIEPRNQH

SEQ ID NO: 51892 - protein, 343 aa, Xanthomonas campestris pv. campestris str. ATCC 33913
MNKLLPTSTAGSLPKPSWLAQPEKLWSPWKLQDEELTEGKQDALRLSLQEQQHAGIDIVSDGEQTRQHFVTTFIEHLSGVDFEKRETVRIRNRYDASVPTVVGAVSRPKPVFVDDAKFLRQQTRQPIKWALPGPMTMIDTLFDAHYKSREKLAWEFAKILNQEAKELEAAGVDIIQFDEPAFNVFFDEVNDWGVATLERAIEGLNCETAVHICYGYGIKANTDWKQTLGSEWRQYEESFPKLQASTIDIVSLECHNSHVPIDLIELVRGKKVMVGAIDVASNTIETPQEVADTLRKALRFVDADKLYPSTNCGMAPLARHVARGKLSALSAGADIIRAELSAQ

SEQ ID NO: 51893 - protein, 268 aa, Brassica napus
  misc_feature (117)..(117): Xaa can be any naturally occurring amino acid
  unsure (1)..(268): unsure at all Xaa locations
QKAELKTMWAAQVSFATKNCNSKMERYVMYTRNAGIEIINFSKTWERLTMAALRAIVANRSAHDILVLSVKRNRWRAGHTSAHYTNPNPISGSKPPVTFTNEMRTALNPRKVMCLTXSIQSIAFCDTDSPMRFVDIGIPANNKGKHSIGCLFWLLARMVLQMRGTIRPAQKWDVMVDLFFYREPEETKPEDEDEVAPQAEFGLPAPEYGGGDQWTTAAIPDAAWPGEAQAPISAAPAAGSWNDSAAPAAAEGGWDAAVPPTTAVTNWE

SEQ ID NO: 51894 - protein, 539 aa, Leifsonia xyli subsp. xyli str. CTCB07
MAKIIAFDEDARRGLERGLNILADTVKVTLGPGGCNVVLEKKWGAPTITNDGVSIAKEIELDDPYEKIGAELVKEVAKKTDDVAGDGTTTATVLAQALVKEGLRNVAAGADPISLKRGIEKAVEAVTAELVGNAKEVESKAQIAATASISAGDTTIGDIIAEAIDKVGKEGVVTVEESNTFGTELELTEGMRFDKGFLSQYFVTDQDRQEAVFEDAYILIANQKISSIKDLLPIVDKVIQANKQLLIIAEDVDGEALATLIVNKIRGIFKSVAVKAPGFGDRRKAMLQDIAILTGGQVISEEVGLKLENVTLDLLGKARKVVITKDETTIVEGAGDPDQIAGRVAQIRGEIDNSDSDYDREKLQERLAKLAGGVAVIKAGAATEVELKERKHRIEDAVRNAKAAVEEGIVAGGGVALIQAGKLAFEKLSLEGDEATGANIVKVAIEAPMKQIAINAGMEPGVVVARVRELPLGHGLNAATGEYVDMLIAGINDPVKVTRSALQNAASIAGLFLTTEAVVADKPEKAAPVAAEPGAGMDF

SEQ ID NO: 51895 - protein, 90 aa, Glycine max
  misc_feature (86)..(86): Xaa can be any naturally occurring amino acid
  unsure (1)..(90): unsure at all Xaa locations
LNENPENYFAEVEQVAFNPAHLVPGIEPSADPVLQSRLFSYPDTHRHRIGVNYQQLPVNQPRVPYRMGNFQRDGSMAFYNQGARPXYLSS

SEQ ID NO: 51896 - protein, 397 aa, Oryza sativa
  misc_feature (277)..(277): Xaa can be any naturally occurring amino acid
  unsure (1)..(397): unsure at all Xaa locations
IRSLKPPANQPNPKDAKNFGWEINGDINFNWKRLLENKTQEIVRLNGVYQRILGNSGVTMIEGAGSLVDAHTVEVTKPDGSKQRYTAKHILIATGSRAQRVNIPGKELAITSDEALSLEELPKRAVILGGGYIAVEFASIWKGMGAHVDLFYRKELPLRGFDDEMRTVVASNLEGRGIRLHPGTNLSELSKTADGIKVVTDKGEEIIADVVLFATGRTPNSQRLNLEAAGVEVDNIGAIKVDDYSRTSVPNIWAVGDVTNRINLTPVALMEATCFSXIPPLSVVGLSEQQALEEAKSDVLVCTSSFNPMKNSISKRQEKTVMKLVVDSETDKVLGASMCGPDAPEIIQGMAVALKCGATKATFDSTVGIHPSAAEEFVTMRTLTRRVSPSSKPKTNL

SEQ ID NO: 51897 - protein, 328 aa, Kribbella sandramycini
KTKPTQHSVAALRNIGIQPDALVCRADRELPEDLKRKIALMCDVDSDGVVACPDAPSIYDIPRVLHSEGLDAYLVRRLGLPFRDVDWSVWGDLLDRVHKPSERVRIALVGKYVDLPDAYLSVTEALRAGGFAHRAKVEIAWVPSYTCETESGAAHALSGMDGVLIPGGFGVRGIEGKLGAIRYARTHGIPTLGLCLGLQCMVIETARALAGLERANSTEFEEPCQHPVISTMADQHDVISGDRDMGGTMRLGSYPAKLVPGSVVAEAYGETEVAERHRHRYEVNNSYRDRLSKAGLVFSGTSPDGRLVEFVELPRDQHPFFVGTQAHP

SEQ ID NO: 51898 - protein, 399 aa, Brassica napus
MALKFNPLVSQPYKLASSARPPVSTFRSPKFLCLASSSSPALSSKEVESLKKPFTPPREVHLQVLHSMPPQKIEIFKSMEDRAEQNLLPHLKDVEKSWQPQDFLPDPASDGFEDQVKELRERARELPDDYFVVLVGDMITEEALPTYQTMLNTLDGVRDETGASPTSWAVWTRAWTAEENRHGDLLNKYLYLSGRVDMRQIEKTIQYLIGSGMDPRTENNPYLGFIYTSFQERATFVSHGNTARQAKEHGDLKLAQICGTIAADEKRHETAYTKIVEKLLEIDPDGTVVAFADMMRKKISMPAHLMYDGRDDNLFDNFSSVAQRLGVYTAKDYADILEFLAGRWRIESLTGLSGEGNKAQEYLCGLTPRIRRLDERAQARAKKGPKIPFSWIHDREVQL

SEQ ID NO: 51899 - protein, 328 aa, Saccharopolyspora erythraea
KTKPTQHSVAALRNIGIQPDALVCRADRELPEDLKRKIALMCDVDSDGVVACPDAPSIYDIPRVLHSEGLDAYLVRRLGLPFRDVDWSVWGDLLDRVHKPSERVRIALVGKYVDLPDAYLSVTEALRAGGFAHRAKVEIAWVPSDTCETESGAAHALSGMDGVLIPGGFGVRGIEGKLGAIRYARTHGIPTLGLCLGLQCMVIETARALAGLERANSTEFEEPCQHPVISTMADQHDVISGDRDMGGTMRLGSYPAKLVPGSVVAEAYGETEVAERHRHRYEVNNSYRDRLSKAGLVFSGTSPDGRLVEFVELPRDQHPFFVGTQAHP

SEQ ID NO: 51900 - protein, 329 aa, Microbacterium oxydans
KTKPTQHSVAALRQVGIQPDALVLRSDRPVSASNRNKIALMCDVDVEGVINTVDLPSIYDIPSTLNEQGLDSYIVRRLGLDQKAADVDWTRWNKVLHAVHNPKHEVTIGLVGKYIDLPDAYLSVTEALKAGGFAQETKVNIRWIPSDLCETPEGAREQLAQLDGICVPGGFGIRGIEGKLGALKFAREQGIPTLGLCLGLQCMVIEYARDVAGIEGASSSEFDPETAEPVIATMAEQVDILDGGDLGGTMRLGLYQAALAEGSLARELYGAPEASERHRHRYEVNNAYRDRLSEAGLVFSGLNPELDLVEYVELPRDVHPYYIATQAHP

SEQ ID NO: 51901 - protein, 401 aa, Bradyrhizobium sp. BTAi1
MTRHQGRHFLHIPGPSPVPERVLRAMDMPVIDHRSAEFGELGKAVLSGSQKIFKTASPVIIYPSSGTGAWEAAIVNTLSPGDKVLMVETGHFATLWRQMAARWGVEVDFIPGDWRRGVDPAMIEEKLAADTAHQIKAVMVVHNETSTGATSRIGEVRAAMDRAKHPALLMVDTISGLASADFRFDEWKVDVAVSCSQKGFMLPPGLGFNAVSDRARAVAKTNKMPRSFWDWEDMLKLNANGFFPYTPATNLLYGLREAIAMLLEEGLDEVFARHQRLAAATRAAVQHWGLEVLCQEPRDYSPVLTAVLMPPGHDADQFRQVVLDNYNMSLGSGLSKVAGKVFRIGHLGECNELTLMAALSGVEMGLRVAGVPHRAGGVDAAMALLEQPMPGNAPRHLAVVN

SEQ ID NO: 51902 - protein, 397 aa, Bradyrhizobium sp. BTAi1
MTVHTGRHFLQIPGPTNVPDRVLRAMDMPTMDHRGPEFAELGFAVLAASQRIFRTKQPVIIYPSSGTGAWEAAIVNTLAPGDKVLMAETGQFAVLWRGIADKFKLDVDFISGDWRHGADIAAIEQRLVEDKAHKIKAVCIVHNETSTGCLTPPLEVRKALDRAGHPALLMVDTISGLGSMEYEHDAWGIDVSVAGSQKGLMLPPGLGFNAVSEKALAAAKANPGMRSYWDWQEIINFNKLGTFPYTPACNLLMGLNEALKMLEEEGHENVFARHRRHSLATRAAVKAWGLDTQCQDPQAHSPALTGVVMPEGHDADQFRKLVLEHFDMSLGTGLNKIKGKVFRIGHIGHFNDLMLMGTLAGVEMGLALANVPHRAGGVLAAMDVLKAREAAPISKVA

SEQ ID NO: 51903 - protein, 817 aa, Schizosaccharomyces pombe
MSVYGKIPSTSFEHENTFELSGDLLDPEELKSLGVSGRIIYVLRHLPFKSSINEETREWDLSGRRGATTMYSSMNWLANSTYWQTTLVGWTGVIPTVSEKEENKDAVTRLDSQDVKRFEETYSQWNSGERSTEYVPVWLPGPEKGSETIINETRSQQSRWLAYAENVIRPLIHYKYWPSSEVDENEEQWWRDYVKMNHAFADKICEIYKPGDFIIVQDYSLFLVPQLIRNKIDDAVIGFYHHHPFPSSEIARCFPRRRAILRSVLGADFIGFEDYSYARHFISCCSRVLDLEIGHDWVNLNGNKVTVRAITVGIDVPRIIRSSGNVSVSEKLEELNKRYENMKVILGRDRLDELYGVPQKLRSFQRFLRTYPEWRKKVVLIQITISSAFKHPKLLSSIKKLVQAINQEFGTDDYTPVHHVEEQLEPADYFALLTRADALFINSIREGVSNLALEYVVCQRDRYGMVLLSEFTATSAMLHDVPLINPWDYNECAEIISNALSTPLERRKMIERESYKQVTTHTMQSWTSSLIRSLANKLAATKTDQRIPTLTPEHALSVYSKASKRLFMMDYDGTLTPIVRDPNAAVPSKKLLDNLATLAADPKNQVWIISGRDQQFLRNWMDDIKGLGLSAEHGSFVRKPHSTTWINLAELLDMSWKKEVRRIFQYYTDRTQGSSIEEKRCAMTWHYRKADPENGAFQALECEALLEELVCSKYDVEIMRGKANLEVRPSSINKGGIVKQILSSYPEDSLPSFIFCAGDDRTDEDMFRSLHKNTRINKETSFAVTIGSDKKLSIADWCIADPANVIDILADLANFTN

SEQ ID NO: 51904 - protein, 132 aa, Oryza sativa (japonica cultivar-group)
MARLAVAAAAAALVAILSAVAVTAQSPSAAPKMAPLPPPPKMAPLPPPPAAKAPTASAPSPVTAASPPAPPMSPASSPSDAAAAAPGPADAGAATAPSSGVSAPALAPAAAGKSAAGAVSASFRLVAVAGEY

SEQ ID NO: 51905 - protein, 314 aa, Glycine max
  misc_feature (292)..(292): Xaa can be any naturally occurring amino acid
  unsure (1)..(314): unsure at all Xaa locations
MELLQNGHKNLVSIKPSELPLLNGAALTLLNSLSETHEYYGNIDPSRVFVTKVKRIIVKVGTAVVTRSDGRLALGRIGALCEQLKELSSQGYEVILVTSGAVGLGRQRLRYRKLANSSFSDLQKPQGELDGKACAAVGQSSLMALYDTMFSQLDVTSSQLLVNDGFFRDSGSRIQLSDTVNSLLDLRVIPIFNENDAVSTRKAPYEDSSGIFWDNDSLAGLLALELKADLLVLLSDVEGLYSGPPSDPNSRLIHTYIKEKHQGEITFGDKSRLGRGGMTAKVNAAVCAAHAXIPVIITSGYATNNIIRVLQGER

SEQ ID NO: 51906 - protein, 624 aa, Debaryomyces hansenii CBS767
MASNITDFYRVLELASNASDDDIKRSYKKLAVKYHPDKTSDTKHHELFIKIQEAYETLKDPEKRRKYDREHRKSNYSSYKSYSTSAHTSTTTSASTSTSRTSRTPGYYGFYQHFYRSYQNPDMAEKQKQAQEEKLKKDREDQSRKAAKIAKEKVEEQLRRDKEERIKRERELEKRKERERYKEKENEREAANAHYNERKRDAYRKEWENTFTHFAQEDDVLDQYFLERRRAQDKAKDKPVFGSVHNGNPLNSQTAYREQDTPDTDSLGQHGHDSSDPIVLDDDGVERRSSKLMSNTQASANGLNGSNKKGSNHNSDSEDEEFVSALHESLDEMESNAAGSNGNGSEQLFNGVEQLFNASMNLRPRQEPSRLSKNRRSVSPSRNKPVAPTTSYVRNNSVSHDHATSKRPKTTGTFGFDDLKDQLGGDIGNVDFSEVLESLPKDVRNDKTRKISEDITSKLKAKRPRVAEYTNGTSKAETLHIPINRNSVKGHYMPSDGRKKILTMLDLHASPTIHNYNSPTPPEALLSKKLTKEIWMRYVSSIRDYQSDFLNYKKHIVQYQLERSKKDEEYFELINSSSACFEVYQQCLERDFKVLQEYTELLRVFTSTMDIYKQNCNWIKMSNS

SEQ ID NO: 51907 - protein, 331 aa, Zymomonas mobilis
MMKEVIIKEAGSADVLALHDAPIPTPKADEILVKIAAAGINRPDIIQRMGQYPLPPDATPIPGLEISGTVIALGQDVEEFKIGDRICGLTNGGGYAEYGVIPAKQALPVPDNLSLTEAAAIPETYFTVWANLFDIGQAKSGETVLVHGGSSGIGSAAIILAKACGLKVFTTVGNQEKAAAVEKLGAIAINYNEQDFLTIIQEEMAGKGVDVILDIIGGSYFSRNMKALAFGGRLVIVGAMGGRIADKFDLLPLIFKRATISGSTMRARTADEKANIARSLREKVWPLLEQGQCHPLIDSSFPLEKVQDAHKRMESRDHCGKIVLTMPEALF

SEQ ID NO: 51908 - protein, 91 aa, Brassica napus
MAATQLTASPVTVSGRSLASLDGLRASSAQFGTLKPGTFKQSLFRSLVVRAASVVAPKYTSIKPLGDRVLVKINEAQEKTMGCILLPSTAQ

SEQ ID NO: 51909 - protein, 363 aa, Triticum aestivum
  misc_feature (229)..(229): Xaa can be any naturally occurring amino acid
  misc_feature (251)..(251): Xaa can be any naturally occurring amino acid
  misc_feature (303)..(303): Xaa can be any naturally occurring amino acid
  misc_feature (351)..(351): Xaa can be any naturally occurring amino acid
  unsure (1)..(363): unsure at all Xaa locations
NKFVQKSRLVPVRNSRDIVDPRVRIIFSFFWTIGTVLEASLAWIVVSTLTWRWLLALTAIPCFLLLPFFGITPESPRYLCAQNRMSDATLVLERIAETNQAALPPGVLVYPRDGEADHSGLTSEADHLLPLREKECTDDDVMSPKSGSAAALRSLLSRKLRRSTLLLWFVFYANSFAYYGLVLLTAQLSNANRSCASGLKYVKSGTDTSLYKDTFVTSLAEIPRLIASXVPFEWVGPKNATMWGPALPTGXCASLGPLLRYQSELWTTGLLFGARACAMGSYTVVCLYAPEVYPTSVRSTGVXGIATAMGRVGGIICPLVAVGMLRSCHQDGTHHWNLRRVLIPCLQLPCXLFPFETKGRAMN

SEQ ID NO: 51910 - protein, 282 aa, Shewanella oneidensis MR-1
MRISLLQCQSSRDVSANLLFIESQLEELTQERQQWGDNSPHLVVLPECSLLFGGHESQQLAYAGDSHHSQLKSALSALATRYRVFMVAGTIPALAEGGRVYSRCYLFDDKGDTLGHYDKLHLFDVDVADGTKQYRESETFCPGDHISVIDTPFGKIGLSICYDLRFPDLFRAMRLAGAEIITVPSAFTKVTGEAHWQVLLQARAIETQCFIVAAAQWGAHNQGSRETWGQSMVIGPWGNIIAERKTGTGWVHADIDLTEVNSIRSKMPVMQHNRFNVPMIKR

SEQ ID NO: 51911 - protein, 802 aa, Zea mays
MAAKLTRLHSLRERLGATFSSHPNELIALFSRYVHQGKGMLQRHQLLAEFDALFDSDKEKYAPFEDILRAAQEAIVLPPWVALAIRPRPGVWDYIRVNVSELAVEELSVSEYLAFKEQLVDGQSNSNFVLELDFEPFNASFPRPSMSKSIGNGVQFLNRHLSSKLFQDKESLYPLLNFLKAHNYKGTTMMLNDRIQSLRGLQSSLRKAEEYLLSVPQDTPYSEFNHRFQELGLEKGWGDTAKRVLDTLHLLLDLLEAPDPANLEKFLGTIPMMFNVVILSPHGYFAQSNVLGYPDTGGQVVYILDQVRALENEMLLRIKQQGLDITPKILIVTRLLPDAAGTTCGQRLEKVIGTEHTDIIRVPFRNENGILRKWISRFDVWPYLETYTEDVSSEIMKEMQAKPDLIIGNYSDGNLVATLLAHKLGVTQCTIAHALEKTKYPNSDIYLDKFDSQYHFSCQFTADLIAMNHTDFIITSTFQEIAGSKDTVGQYESHIAFTLPGLYRVVHGIDVFDPKFNIVSPGADMSVYYPYTETDKRLTAFHPEIEELIYSDVENSEHKFVLKDKKKPIIFSMARLDRVKNMTGLVEMYGKNARLRELANLVIVAGDHGKESKDREEQAEFKKMYSLIDEYKLKGHIRWISAQMNRVRNGELYRYICDTKGAFVQPAFYEAFGLTVIESMTCGLPTIATCHGGPAEIIVDGVSGLHIDPYHSDKAADILVNFFDKCKADPSYWDEISQGGLQRIYEKYTWKLYSERLMTLTGVYGFWKYVSNLERRETRRYIEMFYALKYRSLASQVPLSFD

SEQ ID NO: 51912 - protein, 528 aa, Ustilago maydis 521
MIYAPIAKTQLEWYASLNPLEHGVDNKFFRKTSIIATIGPKTNNVEMLGALRQAGMNIVRLNASHGSHEYFKSVVDNARAVVAKTPGRPLAIALDTKGPEMRTGVMVNGEDVKISMGHEFYVTTDDAYAEKCSLDYLYIDYKNLAQKVEVGRTIFIDDGILSLQVLAIESDKLVKVRAVNNGVLSSKKGVNLPMTEVDLPAISDKDRKDIEFAVEQDLDMIFASFIRRGSDVRTIREILGEKGAHIKIISKVENHQGVQNFDEILKESDGIMVARGDLGIEIPAPQVFMAQKMMISKCNIAGKPVICATQMLESMIVNNRPTRAEVSDVANAVLDGADCVMLSGETAKGAYPIEAVKMMAETAYLAEQSVSYVPLFNEMRTLTSIPTDTNETIAMAAVAASLEQHAGAILLMSTSGTTARLVSKYRPSCPILTITRNSHTARDVHLYRGCYPFLYPHARPEDNSKWQEDVDNRIKYGLAEALALGIIEKGDVVITLQGWRAQSGSTNTIRILSVPESARDFKLEGTQV

SEQ ID NO: 51913 - protein, 726 aa, Xanthomonas campestris pv. campestris str. 8004
MKSPLPWLKRRLSGRADSEHAQNLIRIIITTLFISYLGWRYQHTHGDTLMATWLILVGELLVSLGLMVAILLRPQVSHTRRLIGMLLDYTCTGAIMAIQGEPASPLYAVCMWVTIGNGLRYGSNYLRAATAMGSLCFLGAILISPYWKANPYLSWGLLLGLIAVPLYFDSLLRAMTRAVREARHANQAKSRFLANMSHEFRTPLNGLSGMTEVLATTRLDAEQKECLNTIQASARSLLSLVEEVLDISAIEAGKIRIDRRDFSLREMIGSVNLILQPQARGRRLEYGTQVADDVPDLLKGDTAHLRQVLLNLVGNAVKFTEHGHVLLRVTRVSGSAEDAVRLRFDVEDTGIGVPMDMRPRLFEAFEQADVGLSRRYEGTGLGTTIAKGLVEAMGGSIGFKENQPSGSVFWFELPMAIGEPLKSSTVRVPTGALVDAPEELESSNIIAFSNPFLRHRARVRSMRMLVADDHEANRMVLQRLLEKAGHKVLCVNGAEQVLDAMAEEDYDAVIVDLHMPGMNGLDMLKQLRVMQASGMRYTPVVVLSADVTPEAIRACEQAGARAFLAKPVLAAKLLDTLADLAVSTRQLATPATTVQVATSFEGVLDSSVLDELAALGMGEEFERQFVRQCLDDAQNCVGDIERDGTCSDWEQLRESAHALRGVASNLGLAQVASSGGELMRMADWQLQAEWRLRLSTLREQLKAGKDALDARVQGVKDGECSPRSNE

SEQ ID NO: 51914 - protein, 320 aa, Glycine max; identical to SEQ ID NO: 1147

SEQ ID NO: 51915 - protein, 882 aa, Emericella nidulans
MSLQQDPSKPDGRPGEVRFDSFTDASASNGSSNFNNASKTASALSEADKGTQSGSDLLHRLSLKEILTMRAPDFQKQYQGLNLSGRIISAAFCIPHKLYFRAGRDWELKPRPGSSALFDSFAYLASEKSGWSHTLVGWTGEVEPLNEGSNPLQALNSNANTNLPAALDNTSRSLSKGSAPVVPDISLLQSNSSVAETSTVGPDDRKRLEDQLSSSRHGKVVPVCLSDESDVPEDTIILGDQSRWRRYAEKELYALLHYKQNGPTDGRFERDSWTDYVRMNQLFAERILQEYKEGDIVWIHDYHLFLLPSILRQHVPNIYIGFYLHSPFPSSEYMRCLAKRKEILTGVLGANMIGFQTFSYSRHFSSCCTRVLGFESDSAGVDAYGAHVAVDVFPIGIDAEAIQKIAFENADTEKAVEGLRQLYAGKKIIVGRDRLDSARGVAQKLQAFETFLERFPEWRDKVVLIQVTSPTSVEEEKEEQKIASRISNLVSTINGRFGSLSFSPVKYYPQYLSPHEYFALLRVADVGLITTVRDGMNTTSLEYILCQQENHSPLILSEFSGTAGALSSAIHINPWDTIGVSEAINKALTESVADKKEQHLKLYKHVTTNTVSAWSNQFISRLLANLSSFDQSMATPALDRTKLLKQYRKSRKRLFMFDYDGTLTPIVKDPQSAIPSDRVLRTLKTLAADPRNAVWIISGRDQAFLDEWMGHIPELGLSAEHGCFIRMPRSDNWQNLAETTDMGWQKEVMEIYQHFTERTQGSFIERKKVALTWHYRRADPEYGAFQARECRKQLEEHVSKTWDVEVMAGKANLEVRPRFVNKGFIATRLVQAYEDGKVPEFILCSGDDFTDEGMLFPFLATPKLRHELLLTYLRYVPCLEEI

SEQ ID NO: 51916 - protein, 336 aa, Arabidopsis thaliana
MDLASNLGGKIDKSDVLTAVEKYEQYHVFHGGNEEERKANYTDMVNKYYDLATSFYEYGWGESFHFAQRWKGESLRESIKRHEHFLALQLGIQPGQKVLDVGCGIGGPLREIARFSNSAVTGLNNNEYQITRGKELNRLAGVDKTCNFVKADFMKMPFPENSFDAVYAIEATCHAPDAYGCYKEIYRVLKPGQCFAAYEWCMTDAFDPDNAEHQKIKGEIEIGDGLPDIRLTTKCLEALKQAGFEVIWEKDLAKDSPVPWYLPLDKNHFSLSSFRLTAVGRFITKNMVKILEYIRLAPQGSQRVSNFLEQAAEGLVDGGRREIFTPMYFFLARKPE

SEQ ID NO: 51917 - protein, 559 aa, Escherichia coli
MKQKITDYLDEIYGGTFTATHLQKLVTRLESAKRLITQRRKKHWDESDVVLITYADQFHSNDLKPLPTFNQFYHQWLQSIFSHVHLLPFYPWSSDDGFSVIDYHQVASEAGEWQDIQQLGECSHLMFDFVCNHMSAKSEWFKNYLQQHPGFEDFFIAVDPQTDLSAVTRPRALPLLTPFQMRDHSTRHLWTTFSDDQIDLNYRSPEVLLAMVDVLLCYLAKGAEYVRLDAVGFMWKEPGTSCIHLEKTHLIIKLLRSIIDNVAPGTVIITETNVPHKDNIAYFGAGDDEAHMVYQFSLPPLVLHAVQKQNVEALCAWAQNLTLPSSNTTWFNFLASHDGIGLNPLRGLLPESEILELVEALQQEGALVNWKNNPDGTRSPYEINVTYMDALSRRESSDEERCARFILAHAILLSFPGVPAIYIQSILGSRNDYAGVEKLGYNRAINRKKYHSKEITRELNDEATLRHAVYHELSRLITLRRSHNEFHPDNNFTIDTINSSVMRIPRSNADGNCLTGLFNVSKNIQHVNITNLHGRDLISEVDILGNEITLRPWQVMWIK

SEQ ID NO: 51918 - protein, 544 aa, Chlamydia muridarum
MVAKNIKYNEEARKKIQKGVKTLAEAVKVTLGPKGRHVVIDKSFGSPQVTKDGVTVAKEVELADKHENMGAQMVKEVASKTADKAGDGTTTATVLAEAIYTEGLRNVTAGANPMDLKRGIDKAVKVVVDQIKKISKPVQHHKEIAQVATISANNDAEIGNLIAEAMEKVGKNGSITVEEAKGFETVLDVVEGMNFNRGYLSSYFATNPETQECVLEDALVLIYDKKISGIKDFLPVLQQVAESGRPLLIIAEDIEGEALATLVVNRIRGGFRVCAVKAPGFGDRRKAMLEDIAILTGGQLISEELGMKLENASLAMLGKAKKVIVSKEDTTIVEGMGEKEALDARCESIKKQIEDSTSDYDKEKLQERLAKLSGGVAVIRVGAATENEMKEKKDRVDDAQHATIAAVEEGILPGGGTALIRCIPTLEAFLPMLTNEDERIGARIVLKALSAPLKQIAANAGKEGAIIFQQVMSRSANEGYDALRDAYTDMIEAGILDPAKVTRSALESAASVAGLLLTTEALIAEIPEEKPAAAPAMPGAGMDY

SEQ ID NO: 51919 - protein, 305 aa, Oryza sativa (japonica cultivar-group)
MKRPSCRGSSMAIIHDTSDQQEDNMRSYMDGGGAAAYEEEEEEVEDDDGGGGGGGGGGGGGLGEKKRRLAAEQVRALERSFEADNKLDPERKARIARDLRLHPRQVAVWFQNRRARWKTKQIERDFAALRSRHDALRLECDALRRDKDALAAEIADLRDRVDGQMSVKLEAVAADEHQPPPPPPPPPLAYNSKVVDGSTDSDSSAVFNEEASPYSGAAIDHHHHQTPASYDTAGFTSFFAPSTTLTSSLSFPSMFHASSHFDGHQELLVGGGGAGAVADADLGGAGFFAGDEHAGGLSWYGAEGW

SEQ ID NO: 51920 - protein, 325 aa, Rubrobacter xylanophilus DSM 9941
MSKTVTVTGAAGAIGYAILFRIASGQMLGPDQKLRLKLLEIEPALKAAEGTAMELYDCAFPLLEAVDITADPKEAFDGANVCLLIGARPRQRGMERADLLEANGQIFKPQGRAINDHAADDVRVLVVGNPANTNCLIAMNNAPDVPRERFSAMTRLDENRAVSMLAQKLGVGVEDVRDLVVWGNHSPTMFPDLFNARVKGQRAVDLVEMEWYENEYIPRVGKRGAEIIEARGASSAASAANAAIDHVRDWMLGADSLHSMAVASSGQYGVEEGLVSSFPVRLPGGGEYEIPEGLEVGDFARSKLEITIGELKEERDAVRKLGLIG

SEQ ID NO: 51921 - protein, 132 aa, Sulfolobus solfataricus P2
MSSRREIRWGIAHIYASQNNTLLTISDLTGAEIISRASGGMVVKADREKSSPYAAMLAANKAASDALEKGIMALHIKVRAPGGYGSKTPGPGAQPAIRALARAGFIIGRIEDVTPIPHDTIRRPGGRRGRRV

SEQ ID NO: 51922 - protein, 281 aa, Oryza sativa (japonica cultivar-group)
MRSYMDGGGAAAYEEEEEEVEDDDGGGGGGGGGGGGGLGEKKRRLAAEQVRALERSFEADNKLDPERKARIARDLRLHPRQVAVWFQNRRARWKTKQIERDFAALRSRHDALRLECDALRRDKDALAAEIADLRDRVDGQMSVKLEAVAADEHQPPPPPPPPPLAYNSKVVDGSTDSDSSAVFNEEASPYSGAAIDHHHHQTPASYDTAGFTSFFAPSTTLTSSLSFPSMFHASSHFDGHQELLVGGGGAGAVADADLGGAGFFAGDEHAGGLSWYGAEGW

SEQ ID NO: 51923 - protein, 217 aa, Cryptomeria japonica
MVRGKVNLQRIQNPVNRRVTFSKRKAGLLKKAGELSVLCEAEICSIIFSPTGKLFEFASHSMNRIIGKYKKNCASIGHHIQLQEHLETLRMELENLRIETTHLEKTCKHMNGEDLDFLNFKELQKLEKKMSLSARKIHLRKDKILVENVGSLKSKEKLLELENAEMDKKIGRSHKACHLNINMMDEVNSKLETEASTRQDCLKLTLISRNFHDDNFC

SEQ ID NO: 51924 - protein, 369 aa, Streptococcus pneumoniae R6
MKYKRIVFKVGTSSLTNEDGSLSRSKVKDITQQLAMLHEAGHELILVSSGAIAAGFGALGFKKRPTKIADKQASAAVGQGLLLEEYTTNLLLRQIVSAQILLTQDDFVDKRRYKNAHQALSVLLNRGAIPIINENDSVVIDELKVGDNDTLSAQVAAMVQADLLVFLTDVDGLYTGNPNSDPRAKRLERIETINREIIDMAGGAGSSNGTGGMLTKIKAATIATESGVPVYICSSLKSDSMIEAAEETEDGSYFVAQEKGLRTQKQWLAFYAQSQGSIWVDKGAAEALSQHGKSLLLSGIVEAEGVFSYGDIVTVFDKESGKSLGKGRVQFGASALEDILRSQKAKGVLIYRDDWISITPEIQLLFTEF

SEQ ID NO: 51925 - protein, 230 aa, Brassica napus
MDALGGFWGLNGFNHRRKKNNSSGDRRNQRKSGSSDSVDVSRDAAGYQFPLKQAVTAGALTFTGDTIAQLSGRWKKRAAALKQSSSSDKPDQEELWNLFSEHDWVRALRMSTYGFLLYGPGSYAWYQYLDRSLPKPTVTNIVLKVLLNQVILGPSVIAVIFAWNNLWLGKISELGNKYQKDALPTLLYGFRFWVPVSILNFWVVPLQARVAFMSMGSVFWNFYLSSTLSN

SEQ ID NO: 51926 - protein, 400 aa, Oryza sativa
MASRMALRPNDVTLRLTPPLAAAARRNRRAAAGGVRVYAVASGAVSTKVENKKPFAPPREVHVQVTHSMPPQKIEIFKSLDDWARDNILSHLKPVEKCWQPQDFLPDPASDGFHDEVKELRERAKEIPDDYFVCLVGDMITEEALPTYQTMLNTLDGVRDETGASPTAWAVWTRAWTAEENRHGDLLNKYLYLTGRVDMRQIEKTIQYLIGSGMDPRTENNPYLGFIYTSFQERATFISHGNTARHAKDFGDLKLAQICGIIASDEKRHETAYTKIVEKLFEIDPDGTVLAFADMMKKKISMPAHLMFDGEDDKLFEHFSMVAQRLGVYTAKDYADILEFLVSRWKISDLTGLSSEGNKAQDYLCTLAARIRRLDERAQSRAKKAGTLPFSWVYGREVQL

SEQ ID NO: 51927 - protein, 548 aa, Oryza sativa (japonica cultivar-group)
MLTVAASALRNNKKSTAAACFSLAMPFLLSSPTPPPPPHSSSLPRSPSPRPRLPLPPPRRAALVTAAQDPRWRRAMASLAVSASASASGEEVTHLAQREAAEIDEQLMGPLGFSVDQLMELAGLSVAAAVAEVYKLGEHTRVLVICGPGNNGGDGLVAARHLHHFGYKPSVCYPKRTPKPLYSGLCTQLESLTIPFVPVEDLPANLSEEFDIIIDAMFGFSFHGTPRPPFDDLINRLVSLSAIDNSAKRPAIVSVDIPSGWHVEEGDINGGGFKPDMLVSLTAPKLCAKKFTGPHHFLGGRFVPPPIVSKYKLHLPPYPGTSMCVRIGKAPSVDISSLRENYISPELLENQVMPDPFDQFVRWFDEAVTAGLREPNAMALTTADKEGKPSSRMVLLKGVDKQGFVWYTNYGSQKAHDLSENPNAALLFYWNEMNRQVRVEGSVQKVPEEESEKYFHSRPRGSQLGAIVSKQSTIIPGREVLQQAYKELEQKYSDGSVIPKPDYWGGYRLTPKLFEFWQGQQSRLHDRLQYSLREVDRSTVWHIERLSP

SEQ ID NO: 51928 - protein, 203 aa, Oryza sativa (japonica cultivar-group)
MPPRRGIEVRQAVGDGAAPRWRMSLLENTFSSFLQSIGGGVAADGAAARAVFGEGSLFSPFLFGKFFDPADAFPLWEFEPEVLLAALRRGARTTVDWAETDSEYYLRADIPGGRKCDVEVSGDDAMRVVDVSGLWRAAPPPPPPDGRDWRAGRWWEHGFVRRVELPEDADWRKVEAFFDDGEGLLEIKVPKSGDAHQAAAATA

SEQ ID NO: 51929 - protein, 573 aa, Kluyveromyces lactis NRRL Y-1140
MNINIKKDSGGNGSDLPRWNDSPVGSLGSFNGRRRSMSFSESVNFARNTQNPLDMSAQEMRGLNGFRRSFIAHKSLKLHGKTPNFITRNFNEFLTLYGHFAGEDLSEDEETETEVETDEDEDEEAALLRHGIRGLRHQGADRYGEETSSMAIDDDEGSSENNDIQQQQQLKQQQQHLHKKKRNTSTTKAVLLLLKSFVGTGVLFLPRAFHNGGWLFSTLCLLFCATVSFYCFILLIDTKTAVGVDGYGELGSRLFGPKLKFTVLSSIVLSQIGFAAAYTVFTATNLQAFFKHVFSLEYSLIFWIMIQLAFYLPLSLTRNIARLSATALVADLFILLGLVYVYYYSSFYIWNHGIASDSMVSFNKSDWTLFIGTAIFTYEGIGLLIPIHESMEKPAHFKPALMYVILVVTIIFISCGLICYSAFGAKVETVILLNFPSNSIFTNAVQLIYALAILLSTPLQLFPAIKILENKIFHKNASGKFDAKVKWRKNYFRAFVVLIAVIIAWIGANDLDKFVSLIGSFACIPLIYIYPPLFHYKVFENNKKLQAIDLAILIFGALVMSYTSWQTIALWIH

SEQ ID NO: 51930 - protein, 143 aa, Schizosaccharomyces pombe
MPASKEQTDEMKEAFVLYDIDKDGLIPTSHVGSVLRSLGINVTDAELAKLSNELGDAIDEKKFMSFVSNKLRETESEEEYIKAFRVFDKDNSGYIETAKFADYMKTLGEKLSDNEVQLMVQEADPTNSGSFDYYDFVQRIMAK

SEQ ID NO: 51931 - protein, 331 aa, Vibrio fischeri ES114
MTIKVGINGFGRIGRFVFRASVERNDIEVVGINDLIDVEYMAYMLKYDSTHGRFNGTVEVVDGNLVVNGKTVRVTAERNPEDRKWDAINVDVVAEATGLFLDDATARKHITAGAKKVVLTGPSKDATPMFVMGVNHESYAGQDIVSNASCTTNCLAPVAKVLNDKFGIESGLMTTVHATTATQKTVDGPSAKDWRGGRGASQNIIPSSTGAAKAVGVVLPELNGLLTGMAFRVPTANVSVVDLTVNLKTAASYEAICAAMKEASEGELKGVLGYTEDAVVSQDFIGEVQTSVFDAAAGVALTDKFVKVVSWYDNEIGYSNKVLDLIAHVSK

SEQ ID NO: 51932 - protein, 493 aa, Glycine max
MECSQFSVFLLLSIFVGICLASTEEQERDRIAKLPGQPENVLFAHYSGYVTVNEEAGRALFYWLVETPASIEPSSRPLVLWLNGGPGCSSIGYGAAEEIGPFRINSDGNSLYSNPYAWNNLANILFLDSPAGVGFSYSNTTSDLYTAGDQRTAEDAYTFLVNWFERFPQYKHRDFYIAGESYAGHYVPQLSQLVYRRNKGIENPVINFKGFMVGNAVIDDFHDYIGTFEYWWVNGLISDSTYKKLGIACDFYSSEHPPENCVEALELATLEQGNIDPYSIYTPVCNDIAAIKRRLGGRYPWLSRAYDPCTERYSTLYFNRPEVQKALHANVTGIPYSWAGCNDVIVENWGDSPLSMLPIYQELIEGGIRIWVFSGDTDSVVPVTASRYSIRALNLSTIINWYAWYDNDEVGGWSQVYEGLTLVTVRGAGHEVPLHKPRQGFILFKTFLEDKNMPLPIDRSLSGPTDKSLNKNIRLARPIRKITMPSSTQGFTY

SEQ ID NO: 51933 - protein, 135 aa, Vibrio fischeri ES114
METQKTFLEYTDEEWRKKLTKEEFDICRKQGTEAPFSGTLLHNKEKGYYACTCCQTILFVSDNKYDSGCGWPSFDAPVNDQVIRYIEDNSHGMKRIEIRCRHCDSHLGHVFDDGPKTTNERYCVNSVSLNFSQDK

SEQ ID NO: 51934 - protein, 643 aa, Bradyrhizobium sp. BTAi1
MMDYAGRVRQADTYPKLLRLNAREHGQEIALREKDLGLWRTFTWADYQARVRDFALGMVALGLGKDDVIGIIGDNRPDWVAAEIATHAIRAFSLGLYRDVLDDEAAYLLNYGEARLVFAEDEEQVDKLLNLADRVPALKHIVYSDPRGMRKYDDPRLMPADKLAELGRNRAAREPDLYDRMVDATQGDDVAILCTTSGTTSHPKLAMLSAARVLKHCATYLAFDPKGPEDEYVSVLPLPWIMEQVYVLGKGLLCRMKVNFVEEPDTMMNDFREIAPTFVLFAPRVWEQIAADVRAAVMDASPLKQRLYHLGMSTGLAALEKGQHSSFANMLLFRALRDRLGFTRLRSAATGGAALGPDTFKFFRAMGVPLRTLYGQTELLGAYTLHPADKVDPDTTGVPMSEDIEIRIDQPDSQGIGEILVRHPNMFLGYYKAPEASAADVKDGWMHSGDAGYFNDHKQLVVIDRIKDLAETARGERFSPQYIENKLKFSPYIAEAVVLGAGREHLAAMICIRYSIISKWAEKNRIAFTTYSDLASRNEVYALLQKEVETVNAHLPAAQRIARFLLLYKELDADDGELTRTRKVRRSVINEKYADIIDGIYGGKPAIPVDTVIRFQDGTTQRIRTTLRVVDLGGHGPMAEAAE

SEQ ID NO: 51935 - protein, 606 aa, Mycobacterium leprae
MAIMDTNTEVHTLFTQEVAATQQYFDDPRFAGIIRLYTARQVVEQRGTIPTDYTVARDAATAFYARLRELFAAGKSVTTFGPYSPGQAVSLKRMGIEAIYLGGWATSAKGSITEDPGPDLASYPLSQVPDDAAVLVRALLAADRNQQYLRLHMTEQQRAATPAYDYRPFIIADADTGHGGDSHVRNLIRRFVEIGVPGYHIEDQRPGTKKCGHQGGKVLVPSDEQIKRLNAARFQLDIMRVPGIIVARTDAEAANLIDSRADERDQPFLLGATNLKIPSYKACFLALVRCFYELGVKELHGHLLYALGDGEYAAASAWLDRQGILAQVSGTVNAWQENGKQSIDDLFEQVEYRLLAAWEKDAGLMTYGEAVEEMLQFGESEGELIGMSPEEWRRFVGRASLYAAREKAKELGVDPGWDCELAKTPEGYYQIRGGIQYAIAKSLAAAPFADILWMETKTADLADARQFAEAIHAEFPEQMLAYNLSPSFNWDTTGMSDEEMKRFPEELGKMGFVFNFITYGGHQIDGVAAEEFATALRQDGMLALARLQRKMRLVESPYRTPQTLVGGPVAMQRWLRPPDVRRQPRPWAKVRPSTSILCRPRCRRSC

SEQ ID NO: 51936 - protein, 480 aa, Glycine max
SPKPLDYGSINENVKKSQYAVRGELYLRASELQKEGKKIIFTNVGNPHALGQKPLSFPRQVVALCQAPFLLDDPNVGLLFPADAIARAKHYLSLTSGGLGAYSDSRGLPGVRKEVAEFILRRDGYPTDPELIYLTDGASKGVMQILNTIIRGQDDGILVPVPQYPLYSATIALLGGTLVPYYLEETANWGLDVNELRQSVEQARFKGITVKAMVIINPGNPTGQCLSEANLREVLQFCYQENLALLGDEVYQTNIYQDERPFISSRKVLMELGPPISKEVQLISFHSVSKGYYGECGQRGGYFEMTNIPPETVDEIYKVASISLSPNVPAQIFMGVMLNPPQPGDISYDKFVRESTGILESLRRRARIMTDGFNSCRNVVCNFTEGAMYSFPQIRLPPRALEAAKQAGKVPDVYYCLKLLEATGISTVPGSGFGQKEGVFHLRTTILPAEEDMPDIMDSFKKFNDEFMEQYEDDRGYSRL

SEQ ID NO: 51937 - protein, 689 aa, Epichloe festucae
AVPERYTKDGLDTVDQYFAMGRGHQKGAIDVPSLEMVKWFDSNYHYVKPTLQDNQTFKLVDSPKAVAEFTEAKEAGIITRPVLVGPVSFLHLGKADRGQSVDPIDLLDKLLPVYEQLLVKLKEAGAETVQIDEPTLVFDLPAKTKAAYKPAYEKFIGLGDKIPKLVFTTYFGDIVHNLDLLPKDIYAVHIDLVRNPEQLETVAGAIGSKTILSAGVVDGRNIWKTNFKRAIETVESAVQKLGKERVIVATSSSLLHTPHTLASEKKLDPEVADWFSFASEKAVEIAIIAKAVTDGPASVREKLEANAKSMQARATSSRTNDPKVKDRQSKVTEKDHQRQAEFTTRIAAQQKKLNLPLFPTTTIGSFPQTSEIRVQRNKFTKGEISQEQYDKFIEEEIKQNVKIQEELGLDVFVHGEPERNDMVQYFGERLNGYTFTTHAWVQSYGSRCVRPPIIVGDISRPAPMTVKESKYAVSVSSKPMKGMLTGPVTCLRWSFPRDDVHQSVQAQQLALALRDEVVDLEKAGVDVIQVDEPALREGLPLRSGKERDAYLEWAVNAFKLSTAGVENATQIHSHFCYSEFQDFFHAIAALDADVLSIENSKSDAKLLRVFVDSAYPRHIGPGVYDIHSPRVPSEQEIRDRIEEMLQFLKPEQLWIDPDCGLKTRQWKETKEALVNMVNAAKYYRTKYAK

SEQ ID NO: 51938 - protein, 434 aa, Mannheimia succiniciproducens MBEL55E
MNNAVLNQPNKYDLVKDTLVLILAGGRGSRLHELTDKRAKPALYFGGNRRIIDFALSNCINSGLNRIGVITQYAAHSLLRHLQTGWSFLPQERGEFVDMLPARQQIDDNTWYRGTADSVYQNLAIIRGHYKPKYVLILAGDHIYKMDYSQMLLDHVSSGAKCTVGCIEVPREEAKEFGVMAVNETLKVKAFVEKPQDPPAMIGKPNSSLASMGIYVFNADYLYEALDRIKTPNTSHDFGKDVMPLALNDGVLYAHPFDRSCKGRNTEGAIYWKDVGTLDSFWQANIDLVSEEPQLDIYDQTWPIRGNPVQAYPSKFFYDEPNCKQVDNSLIAGGCMVKNASISYSVLFDNVSVNAGSSIEQSVILPQVKIGKNCMLRRCIIDRHVQIPDGMQIGVDLELDSKRFRISKNGIVLVTESMLHKLNGKSVASEAHLD

SEQ ID NO: 51939 - protein, 291 aa, Medicago sativa
GENVEKIGEGTYGVVYKARDRVTNETIALKKIRLEQEDEGVPSTAIREISLLKEMQHRNIVRLQDVVHSDKRLYLVFEYLDLDLKKHMDSSPEFIKDPRQVKMFLYQMLCGIAYCHSHRVLHRDLKPQNLLIDRRTNSLKLADFGLARAFGIPVRTFTHEVVTLWYRAPEILLGSRHYSTPVDVWSVGCIFAEMANRRPLSPGDSEIDELFKIFRILGTPNEDTWPGVTSLPDFKSTFPRWPSKDLATVVPNLEPAGLDLLNSMLCLDPTKRITARSAVEHEYFKDIKFVP

SEQ ID NO: 51940 - protein, 443 aa, Brassica napus
  misc_feature (22)..(22): Xaa can be any naturally occurring amino acid
  misc_feature (41)..(41): Xaa can be any naturally occurring amino acid
  unsure (1)..(443): unsure at all Xaa locations
RKRTTPASRTRVGNYEMGRTLXEGSFAKVKYARNTVTVDIXSAAIKILDRDKILRHKMVEQLKREISTMKLIKHPNVVEIIEVMASKTKIYIVLELVNGGELFDKIAQQGKLKEDEARRYVHQLINAVDYCHSRGVIHSDLKPENLIPDANGILKVSDFGLSAFSLQVRGDGLLHTACGTPNYVAPEVLSDKGYDGAAADVWSYGIILFVLMAGYLPFDEPNLMTLYKRICKAEFSCPSWFSPGAKEVIKRILDPSPITRISIAELLEDEWFKQGYKPPSFGQDDEDITIDDVDAAFSNSKESLVTEKKAKPESMNAFELISSSNSLENLFEKQAQLVKKETRFTSQRPASEIMSKMEETAKPLGFNVRKDKYKIKMKGDKSGRKGQLSVATEVFEVAPSLHVVELRKTGGDTLEFHKFYKNFSSGLKDVVWNTDGAPEEHKA

SEQ ID NO: 51941 - protein, 426 aa, Debaryomyces hansenii CBS767
MEHNETSTKSLNDISLEELSKRQQQQNIYVQPVLGSQTDDNRMSIDKQSDGNTGDEEMGLVARGGPGDTRDDNNGGMGTTESSNTLSQTDLTKKPSRHGDRDTTTKGKYTLNDFQILRTLGTGSFGRVHLTRSIHNGRFYAMKTLKKERVVNMKQVEHTNDERRMLKLAQHPFIIRMWGTFQDCHNLFMIMDYIEGGELFSLLRKSQRFPTPVAKFYAAEVFLAIEYLHELDIIYRDLKPENILLDKNGHIKLTDFGFAKEVSDVTYTLCGTPDYIAPEVVATKPYNKSVDWWSFGILIFEMLTGYTPFYDPTPMKTYENILNGTITYPDYLPPDILDLLQKLIVKDLSQRLGNLQDGSDGIKNHPWFKEVIWERLLSRDIETPYEPPITSGIGDTSQFDRYPEDKDLDYGISGVSDPYGSMFGDF

SEQ ID NO: 51942 - protein, 456 aa, Suaeda maritima subsp. salsa
MESCSRTHEAAYMGMEDGGLLLKGSGKEIRHGRTAHNVSASSLRKKSDLQSISKIRFGWLRNILANLQEVILGTKLAILFPAVPMAIVAHVYGFGREWVFALSLLALTPLAERVSFLTEQISFFTGPTVGGLLNATCGNATEMIIAILALSQNKIEVVKYSLLGSILSNLLLVLGTSLFCGGIANLNKEQKFDRKQADVNSILLLLGLLCHVLPLLLSFGAKTAVEAAALPTLNLSRVSSIVMLLAYCAYLVFQLWTHRQFFEAQEDSEGDDGEGGEEEVAVIGFWSGFAWLVGMTLVIALLSEYVVGTIEAASDSWGISVSFISIILLPIVGNAAEHAGAVIFAFKNKLDITLGVALGSATQISMFVVPLCVVVSWIMGVKMDLNFNTVETGSLAISIIVTAFTLQDGTSHYMKGLVLLLCYIVIGACFAVIGTPLNPVNNIVNVANTSANNIVF

SEQ ID NO: 51943 - protein, 205 aa, Epichloe festucae
MAPSNLPSVLNATSADIEMLLAAQTHVGSKNLQVHMEPYLWKTRADGVNIINIGKTWEKIVLAARIIVAIDNPADICVISARPYGQRAVLKFAAHIGASSIAGRFTPGSFTNYITRSFKEPRLIIVTDPRTDAQAIKEASYVNIPVIALCDTDSSTEYVDVAIPTNNKGRHAIGTIWWLLAREVLRLRGSIKDRETWDVMPDLFF

SEQ ID NO: 51944 - protein, 571 aa, Arabidopsis thaliana
MALLIITALVFSSLWSSVSPDAQGDALFALRSSLRASPEQLSDWNQNQVDPCTWSQVICDDKKHVTSVTLSYMNFSSGTLSSGIGILTTLKTLTLKGNGIMGGIPESIGNLSSLTSLDLEDNHLTDRIPSTLGNLKNLQFFFTANNLSCGGTFPQPCVTESSPSGDSSSRKTGIIAGVVSGIAVILLGFFFFFFCKDKHKGYKRDVFVDVAGTNFKKGLISGEVDRRIAFGQLRRFAWRELQLATDEFSEKNVLGQGGFGKVYKGLLSDGTKVAVKRLTDFERPGGDEAFQREVEMISVAVHRNLLRLIGFCTTQTERLLVYPFMQNLSVAYCLREIKPGDPVLDWFRRKQIALGAARGLEYLHEHCNPKIIHRDVKAANVLLDEDFEAVVGDFGLAKLVDVRRTNVTTQVRGTMGHIAPECISTGKSSEKTDVFGYGIMLLELVTGQRAIDFSRLEEEDDVLLLDHVKKLEREKRLEDIVDKKLDEDYIKEEVEMMIQVALLCTQAAPEERPAMSEVVRMLEGEGLAERWEEWQNLEVTRQEEFQRLQRRFDWGEDSINNQDAIELSGGR

SEQ ID NO: 51945 - protein, 196 aa, Lycopersicon esculentum
MEGNNSSSKSTTNPALDPDLDSPDQPGLEFAQFAAGCFWGVELAFQRVGGVVKTEVGYSQGNVHDPNYKLICSGTTEHAEAIRIQFDPNVCPYSNLLSLFWSRHDPTTLNRQGNDVGKQYRSGIYYYNDAQAQLARESLEAKQKEFMDKKIVTEILPAKRFYRAEEYHQQYLEKGGGRGCKQSAAKGCNDPIRCYG

SEQ ID NO: 51946 - protein, 393 aa, Arabidopsis thaliana
MASLDSLVIFLFSTLFVTIVSSETPCPNFKSIISFGDSIADTGNLVGLSDRNQLPVTAFPPYGETFFHHPTGRSCDGRIIMDFIAEFVGLPYVPPYFGSKNRNFDKGVNFAVAGATALKSSFLKKRGIQPHTNVSLGVQLKSFKKSLPNLCGSPSDCRDMIGNALILMGEIGGNDYNFPFFNRKPVKEVEELVPFVIASISSTITELIGMGGKTFLVPGEFPIGCSVVYLTLYKTSNKDEYDPSTGCLKWLNKFGEYHSEKLKVELNRLRKLYPHVNIIYADYYNSLLRIFKEPAKFGFMERPFPACCGIGGPYNFNFTRKCGSVGVKSCKDPSKYVGWDGVHMTEAAYKWIADGILNGPYANPPFDRSCLRSEIKKESLYNQSTLTQACVKL

SEQ ID NO: 51947 - protein, 64 aa, Triticum aestivum
NSARDLLRLVLKEGTVVPRACKELFWKMCKILHLFYFRTDGFSSPKEMASAVNAVINEPLKLPS

SEQ ID NO: 51948 - protein, 905 aa, Arabidopsis thaliana
MRLRHQGGQYLARGMEPVYWSNKVDSTHDLYDNYTLGSYQNNSYNILAHTGFGYDHEFQIYEINSNSWRIIDATLDFKLGYIGRGVSLKGKTYWIASGEEEKRLGKFLISFDYTTERFERLCLPNKYPCYATLALSVVREEKLSMLSQRGIKSKAEIWVTNKIGETQVVSWSMVLALDLQPKRCIGESGSFLVDEKKRVVVCCDNIRDQGKTTFDSNLPRYHRQKKKGRMIIVFDVESMRLPVTVKATKPSFLVIWIRYSSAASSPTVSLNPSGRLQQTLAGSVEVKGKSLHSGKFSTVKLNPEIAGAGRFFEFRSRFIPASIEFAQESPLCTTLLKDELKIRTVEHLLSALEAKGVDNCRIQIESESSDDREVEVPIFDGSAKEWVDAIQGVGINAAQNHDGESVEKMVAHVNKPVDSDHLWYRLPTGCQWFSWRPIHESSFAKDIASSRTFCVYEEVERMREAGLIKGGSLDNAIVCSAEHGWMNPPLRMRRRRCDLQPKRTRMCDLQPKRTSMCDLPPKLVGEKILTRIPITSLRAVRSTCKLWNALTKDRVLVRFHLRRSKEEEEDTMDLSIKQVDLLNQVEISRVYHCDGLLLCVAKDNSRVVVWNPYLGQTRWIRPRTESNIGDSYALGYDINRNHKILRMVQTRNVSVYRYEIYDLRSNSWRVLEVTPNGEMDPNHPLYGVSVKGNTYFFAHEDSSSGEIDEDGDIIDLEDFLLCFDFTTETFGLRLPLPFHSTIDATVTLSCVRDQQLAVLYHNEGLHSDDRFTTVEFWVTTSIEPNSVSWSKFLTVDMRPLALTGVRFDNDMGATFFIDEDEKVAVVFDLDGYLSTESARYHTAFISGKDGFFKPVTLGVAPNVGEPCPRTGHIPTTYRPPLVCSSTYLPSLVQVNQQRKRKERHV

SEQ ID NO: 51949 - protein, 215 aa, Brassica napus
  misc_feature (78)..(78): Xaa can be any naturally occurring amino acid
  misc_feature (115)..(115): Xaa can be any naturally occurring amino acid
  misc_feature (173)..(173): Xaa can be any naturally occurring amino acid
  misc_feature (204)..(204): Xaa can be any naturally occurring amino acid
  unsure (1)..(215): unsure at all Xaa locations
MKLNYNNYSAQNGSYGSYYYPQAYHYPRYDYDMTYPSGKTTNNTPYLGRSGGGYMDSMYSIYGPYSYFSGYGYDTYCXGTSKYTHNRNVWYDFYNTKGYGLYGKDNAEWLNERGXNELNRGPRAKGFKTGQPETVKAAPPEDVSLPDSKEYNKEDFSDSYYSHAKLFVIKSYXEDDVHKSIKYNVWSSTPNGNKKLNAAYNEAXDKSCPVFLIFS

SEQ ID NO: 51950 - protein, 519 aa, Gluconobacter oxydans 621H
MTSRFRASLSALAATTMLVSAPFAFADTPSAAPQAGATTAASGAIKPQTGVQTLPNFVNLVKQVKPAVVSITSHIKADVADEEENGPGGGGGQGGGMPFPFPFPFQMMPQQQPNRTVEARGSGFIISSDGYVVTNNHVVNGATKVTVTLDDGTTLPAKIIGRDPKTDVALLRVKPTGKLPFIELGDSDEVQPGEWVIAVGNPYGLGGTVTAGIVSALGRDLHSGAYNDFIQVDAPINHGNSGGPLFTQDGKVVGINSMIISPNGGGSIGIGFAIPSDTVKSVVSQLEKTGHVTRGYLGIEGQDISPTMAQALNLQSPEPGAPPRGTLVASVSKGSPAEKAGIKSGDVVTTLNGKPIKNGHDLAVKVVSIAPGTPATLGLLRDSKPMTVNFTVGNLSAQDHSSGDATDSAQSGAGKLGVSLASLTPRARQELGLDDSVQGAVVADVVQGSPADQSGIRPGDIIVAVGNHVTPSPKAVVAQVHEALGRKQPPLLRILRDGQQLFVAVSPNGSDDDSSDDGQ

SEQ ID NO: 51951 - protein, 393 aa, Listeria monocytogenes EGD-e
MNQKIKQIVLNNESEMIAFRRDLHMHPELQWQEFRTTDQVAKELDKLDIPYRRTEPTGLIAELKGGKSGKTVALRADMDALPVQELNQDLPYKSTEDGKMHACGHDAHTAMLITAAKALVEIKDELPGTVRFIFQPSEEIAEGAKEMIAQGAMEDVDHVFGIHIWSQTPSGKISCVVGSTFASADIIQIDFKGQGGHGAMPHDTIDAAVIASSFIMNLQAIVARETDPLDPVVVTIGKMDVGTRYNVIAENARLEGTLRCFNNTTRAKVAKSIEHYAKQTAAIYGGTAEMIYKQGTQPVINDEKSALLVQETITESFGEEMLYFERPTTGGEDFSYFQDEAPGSFALVGCGNPEKDTEWAHHHGRFNIDESVMKNGAELYAQFAYNYLNQAEI

SEQ ID NO: 51952 - protein, 383 aa, Leifsonia xyli subsp. xyli str. CTCB07
MDSTWLVLLALGLGLIVGAGFVWMLHVAERRGSHAAQVVSPSVPDGVDQVLDAMESAGVVLDPSNNLIKASPGALAIGLVWNGALVHAYLAELADRVRRTGESVTEECELARGPFGEANIRLSVRVARLGSRYILLLAEDRTESFRLDSVRRDFVANISHELKTPIGAVGLLAEALDEASDDPGQVRRFALRLSEEASRLARITQDIIELSRLQVADALGNAVELSARKVVKAAIDQNKVAAEARRIEIAMRGDKDAMVLGNEPLLVTAVHNLISNAIQYSPGDSRIGIGVRALDGVVEIAVTDQGDGIPEEDLDRVFERFFRVDQARSRNTGGTGLGLSIVKHAVENHGGDVRVWSQPGRGSTFTIRLPEVSAIHPPIGENQ

SEQ ID NO: 51953 - protein, 422 aa, Oryza sativa (japonica cultivar-group)
MVLPGSKESQNYDSNNQKVHPQPIDENMNQNMGSMDTMIGRIFNNISSLKSAYIQLQEAHTPYDPDKIQAADQLVIEELTKLSELKHAYREKNPKPVAATPQDARLLSEIQEQQNLLKTYEVMVKKFQSQIQTRDTEITHLQQQIDEAKLRKSKLEKKLKQRGLLNKESEESDDEDNYFSIELTPSLFTSAVDNAYQSIHDFSKPLINMMKAAGWDLDAAANAIEPAVVYTRRAHKKYAFESYICQRMFGGFQEESFSVKAANITVSNEAFFHQFLAVRAMDPLDVLSQNPDSVFGKFCRSKYLLLVHPKMEGSFFGNMDQRNYVMSGGHPRTPFYQAFLKLAKSIWLLHRLAYSFDPKVKVFQVKKGSDFSEIHMESVVKNIILDEGAERPKVGLMVMPGFLIGTSVIQSRVYLSGVKSAD

SEQ ID NO: 51954 - protein, 572 aa, Kluyveromyces lactis NRRL Y-1140
MSFRCSVKFGERRGSFLMSRGLSNISRFPKPKDAEIENFVNAQAESIAKWWESDRFKNIKRPYTPLDVVKHRGSLGDDVVYGSSIQAKRLFQVLENKFKNKLPVHTLGVIDPVQMSQLARCDDIEVAYVSGWACSSTMVGSTNEVSPDFGDYPYDTVPNQVERIFKAQQMHDKKQLLQFLESKDTNKRVDYLKPIIADADMGHGGTTTVMKLAKLFAEKGAAGIHLEDQLHGGKRCGHLGGAVIVPTSTHISRLVATRLQWDIMGTENLVIARTDSCNAKLLSSNVDPRDHEHIQGTINKNVKPWSDFLSELEFDNAPSTKISMAEANWYKENKLYTFEEAAKEQLSESQFQTFKEQWNKNLKLGKRGYLSIDELKSLVRSVNGGSDIVFNWDAPRTKEGFYMFKGGMKPAIQRSLAFAPYADLLWLETKSPDLKQAQAFSKEIHDVYPEAKLVYNLSPSFNWSAHGFDDEQLQSFIWDLAKEGFVLQLVSLAGLHSDASSFWKLAKRYQTEGMKAYVEEVQKVEKENGCDVLTHQQWSGAEYVDSIMQVVQNGSSSQTLSTTGESFTETQF

SEQ ID NO: 51955 - protein, 421 aa, Brucella suis 1330
MTTENLLESALVRLDEAASHINIDADVIEKLKFARETMKVRLMIRMDDGSRKSFIAWRCRYDDTRGPTKGGIRYHPDSTVEEVETLAFWMTFKCAVMNLPYGGGKGAIQVDPRQLSKAELERLSRAYIQAFSGIIGPDRDIPAPDVYTNSMIMGWMADEYSQIVGQSSPAVITGKPIALGGSLGRNDATARGGFYLVRHLSHDLGLASVLRVAIQGFGNAGQFMAKLMAGDGHKIVAVSDSAGAVYCADGLDVDLLLAAKADGKSVISTAGHKGHEAISADELVAADCDVLVPSAMENMIHASNAASIRAKLIVELANGPVTGDADKILAEKGVMVLPDILANAGGVTVSYFEWVQNRQGYYWTLEEIHERLKTIMEREGRAIWNHARERGVTLRTAAYVHALERLAQAIEAHGTQNDFAA

SEQ ID NO: 51956 - protein, 467 aa, Pseudomonas putida
MQQAQGLKRGLNARHIRFMALGSAIGTGLFYGSASAIQMAGPAVLLAYLIGGAAVFMVMRALGEMAVHNPVAGSFGHYASTYLGPMAGFILGWTYAFEMVIVAIADVTAFGIYMGFWFPEVARWIWVLGIVFLIGGLNLCNVKVFGEMEFWLSLLKVGAIVAMILAGLGIMAFGFSQVGTGHAVGVSNLFDHGGFMPNGVGGLIASFAVVMFAFGGIEIIGVTAGEAKDPQRVIPKAINAVPLRILLFYVLTLFVLMCLYPWPQIGSEGSPFVQIFSNLGIGSAAAVLNVVVISAAISAINSDIFGAGRMMYGLAHQGHAPRSFGKLSKHGVPWMTVVVMGAALLIGVLLNYLIPENVFLLIASIATFATVWVWLMILLTQVAMRRSMSREEVAQLKFPVPFWPYGPAMAIAFMVFIFGVLGYFPDTQAALIVGVIWVVFLVASYLLWCKPRAGQGQPVAEPVELHR

SEQ ID NO: 51957 - protein, 265 aa, Arabidopsis thaliana
MAEEYKNNVPEHETPTVATEESPATTTEVTDRGLFDFLGKKEEEVKPQETTTLESEFDHKAQISEPELAAEHEEVKENKITLLEELQEKTEEDEENKPSVIEKLHRSNSSSSSSSDEEGEEKKEKKKKIVEGEEDKKGLVEKIKEKLPGHHDKTAEDDVPVSTTIPVPVSESVVEHDHPEEEKKGLVEKIKEKLPGHHDEKAEDSPAVTSTPLVVTEHPVEPTTELPVEHPEEKKGILEKIKEKLPGYHAKTTEEEVKKEKESDD

SEQ ID NO: 51958 - protein, 543 aa, Oryza sativa (japonica cultivar-group)
MPSCRTLASMGFTGVLSPRIGELQFLNVLSLPGNKITGGIPEQIGNLSSLTSLDLEDNLLVGPIPASLGQLSKLQILILSQNNLNGTIPDTVARISSLTDIRLAYNKLSGSIPGSLFQVARYNFSGNNLTCGANFLHPCSSSISYQGSSHGSKVGIVLGTVVGAIGILIIGAVFIVCNGRRKSHLREVFVDVSGEDDRRIAFGQLKRFAWRELQLATDSFSEKNVLGQGGFGKVYKGALPDGTKIAVKRLTDYESPGGEAAFLREVELISVAVHRNLLRLIGFCTTQTERLLVYPFMQNLSVAYRLREFKPGEPILDWSARKRVAIGTARGLEYLHEHCNPKIIHRDVKAANVLLDEDFEPVVGDFGLAKLVDVQKTSVTTQVRGTMGHIAPEYLSTGKSSERTDVFGYGIMLLELVTGQRAIDFSRLEEEDDVLLLDHVKKLQREGQLGAIVDRNLSSNYDGQEVEMMIQIALLCTQASPEDRPSMSEVVRMLEGEGLAERWEEWQQVEVTRRQDYERMQQRFDWGEDSIFNQEAIELSAGR

SEQ ID NO: 51959 - protein, 499 aa, Brucella suis 1330
MTDRPIMTTSAGAPIPDNQNSLTAGERGPILMQDYQLIEKLSHQNRERIPERAVHAKGWGAYGTLTITGDISRYTKAKVLQPGAQTPMLARFSTVAGELGAADAERDVRGFALKFYTQEGNWDLVGNNTPVFFVRDPLKFPDFIHTQKRHPRTHLRSATAMWDFWSLSPESLHQVTILMSDRGLPTDVRHINGYGSHTYSFWNDAGERYWVKFHFKTMQGHKHWTNAEAEQVIGRTRESTQEDLFSAIENGEFPKWKVQVQIMPELDADKTPYNPFDLTKVWPHADYPPIDIGVMELNRNPENYFTEVENAAFSPSNIVPGIGFSPDKMLQARIFSYADAHRHRLGTHYESIPVNQPKCLVHHYHRDGQMNVYGGIKTGNPDAYYEPNSFNGPVEQPSAKEPPLCISGNADRYNHRIGNDDYSQPRALFNLFDAAQKQRLFSNIAAAMKGVPGFIVERQLGHFKLIHPEYEAGVRKALKDAHGYDANTIALNEKITAAE

SEQ ID NO: 51960 - protein, 489 aa, Burkholderia mallei ATCC 23344
MTTAHETLALKDPALLRERAFVAGEWQAADGGATLEVRNPATGALIGTVPAMGAAETRRAIDAANAAWPAWRKKTAKERAAILRKWHDLMIAHADDLALILTTEQGKPLAEAKGEIGYAASFLEWFAEEGKRVYGDTIPTPAADKRIVVTKEPVGVCAAITPWNFPAAMITRKVGPALAAGCPIVVKPAEATPFSALAMAVLAERAGVPAGMFSVVTGEPKAIGGELTSNPIVRKLSFTGSTPVGRLLMAQCAATVKKVSLELGGNAPFIVFDDADLDAAVEGAIASKYRNSGQTCVCTNRFYVHEKVYDAFAEKLTAAVAKLKVGPGTEAGVVQGPLINGAAVRKVEAHIADALDKGARVTTGGQRHPLGHGFFEPTVLTGVTPDMKVAKEETFGPLAPLFRFSTEEEAIRYANDTEFGLAAYFYSRDIGRVWRVAEALEYGMVGINAGIISNEVAPFGGVKQSGLGREGSHYGIDDYVVIKYMCVAV

SEQ ID NO: 51961 - protein, 167 aa, Helianthus annuus
EFQVGPSVGISAGDELWVARYILERITEIAGVVVSFDPKPIPGDWNGAGAHTNYSTKSMRDEGGYEVIKKAIEKMGLKHKEHIAAYGEGNERRLTGRHETADINTSLWGVANRGASIRVGRDTEKEGKGYFEDRRPASNMDPYVVTSMIAETTIFVEQILKIIRFGP

SEQ ID NO: 51962 - protein, 198 aa, Arabidopsis thaliana
MISLFISNFSNLSNLSPTFDNMNMNIPSKKIVPVPTPSEKVVSLVSRTGRDLQRYNTAGYRQVVGCVPYRYKKHGGGEIEVLLISAQKKGKGMLLPKGGWEIDESIEEAALRETIEEAGVTGQLEESLGKWQYKSKRHTMIHDGHMFPLLVSQQFEIWPESEFRQRKWVSLSEAIELCQNSWMREALEAFINRKCQTQ

SEQ ID NO: 51963 - protein, 156 aa, Helianthus annuus
EFQVGPSVGILAGDEIWAARYILERITEIAGVVVSFDPKPIPGDWNGAGAHTNYSTKSMREEGGYEIIKKAIEKLGLRHKEHIAAYGEGNERRLTGKHETANINTFKWGVANRGASIRVGRDTEKDGKGYFEDRRPASNMDPYVVTSMIAETTILL

SEQ ID NO: 51964 - protein, 585 aa, Anabaena variabilis ATCC 29413
MTITANSQLPNRFPQNLESMNHKADGLLATLGAELVYVQDGVGRYLSFYWQKSELLGFNQEQIVCDGNGQEIFVPLDKVSYMKRLHYVMANLAPEKFSCWFSCHQNLFELELAITPIIPPLGTAATTVLVMGRLLQVKVNNQEVNVAITTPTQTDLASRSQQHQRLVNKITRNIRRTLDLDVIWQQTVDSLGKALRLERCIICPYQPSSSKVRVIAEYHQPDRPSMLGLEIDVTSEPAFAQALTTLEPIIMEVPGYKLCPQQKILVVATCYQDQANGLIAINLRHECYPLTNAELELAKEVADQLGTAIAHATLYKELEAARQKAEEASRLKSEFLANVSHEIRTPLNGMIGFLKLILEGMADDVEEKNQFLSEAHQLSLHLLNIINDILDIAKIEAGKMELVCAPIKLEELFSDVDNFMRPQAEVKNLSFRMQLPPTSDEIVVQGNYQRLLQVMLNIVGNAIKFTHEGGITVSADVVLKKGKLQEQHFPGMVRVRIADTGIGVSLDQQDKLFQLFSQVDGSRTRQYGGTGLGLAISQKLVETMGGEVHFYSLGEGLGSTVTFTVPLYQQPVMLSSNDADAECIG

SEQ ID NO: 51965 - protein, 150 aa, Prosthecochloris aestuarii DSM 271
MIKILKILCPVDFSDASKKSIRYAHEFARGMGASLYLLNVVEPRPMAVDMSLSYVPLEEDLEKAAREDLELIVAAEREKGIVVEADVEIGTPSEIILEKAAELDVNLIILGSHGKTGLSRLLMGSVAESVVRKAQCPVLIVKAEETDFIE

SEQ ID NO: 51966 - protein, 425 aa, Shigella flexneri 2a str. 301
MTRRGKCRGALPSDTLSRGFRMGQSSQPHELGGGLKSRHVTMLSIAGVIGASLFVGSSVAIAEADPAVLLAYLFAGLLVVMIMRMLAEMAVATPDTGSFSTYADKAIGRWAGYTIGWLYWWFWVLVIPLEANIAAMILHSWVPGIPIWLFSLVITLALTGSNLLSVKNYGEFEFWLALCKVIAILAFIFLGAVAISGFYPYAEVSGISRLWDSGGFMPNGFGAVLSAMLITMFSFMGAEIVTIAAAESDMPEKHIVRATNSVIWRISIFYLCSIFVVVALIPWNMPGLKAVGSYRSVLELLNIPHAKLIMDCVILLSVTSCLNSALYTASRMLYSLSRRGDAPAVMGKINRSKTPYVAVLLSTGAAFLTVVVNYYAPAKVFKFLIDSSGAIALLVYLVIAVSQLRMRKILRAEGSEIRLRMWLDP

SEQ ID NO: 51967 - protein, 249 aa, Leifsonia xyli subsp. xyli str. CTCB07
MSASHALILLRHGNSEWNRQNLFTGWVDVRLSEQGVAEAKRAGELLAESGLVPDILYTSLLTRAIQTANHALDAADRLWIPVVRSWRLNERHYGALQGLDKAETLEKYGPEQFQLWRRSFDVPPPPLADDSEWSQADDPRYADLGADLPRTECLKDVIARMLPFWESDITTSLSAGKTVLVTAHGNSLRALVKHLDGISDDDIAELNIPTGVPLVYKLDDSFKPVEPAAYLDPEAAAVGAAAVAAQGKK

SEQ ID NO: 51968 - protein, 151 aa, Silicibacter sp. TM1040
MKRRTLIAGMLCSAAVPLRAAEGPFEITRSEAEWRAMLTDVEYAVMREEATETAFSSPLDTETRSGTFHCKGCDLPLYSSAHKYDSGTGWPSFWQSLPNAVGTKPDNSLFATRTEVHCRRCGSHLGHIFEDGPQPTGKRHCLNGVSLAFRT

SEQ ID NO: 51969 - protein, 184 aa, Laccaria bicolor
MRSKFKDEHPFEKRKAEAERIRQKYPDRIPVICEKADRTDIPTIDKKKYLVPSDLTVGQFVYVIRKRIKLAPEKAIFIFVDEVLPPTAALMSAIYEEHKDEDNFLYVSYSGENTFGQEGWVELPVDDMDKAFICVSAAKKHWVWVLCDVRSSYQNCVLIVPLVQRPVLHTHSSFLSVSFALLFV

SEQ ID NO: 51970 - protein, 369 aa, Corynebacterium efficiens
MRERIATAKRVVVKIGSSSLTSDEGGHTVDPNRINTIVNALQARMEAGSDVIVVSSGSVAAGMAPLGLTTRPTDLSMKQAAAAVGQVHLMHQWGRSFARYGRPVGQVLLTAGDAGQRDRARNAQRTIDRLRMLGVIPIVNENDTVATTGVNFGDNDRLAAIVSHLVSADALVLLSDVDGLFDKNPADPTARFISEVRDGNDLKGVLAGDGGKVGTGGMASKVSAARLASRSGVPVLLTSAANIGPALEHAQVGTVFHPKENRLSAWKFWALYAADTAGKIRLDQGATEAVTSGGKSLLAVGITEVIGDFRAGEIVEILGPNGEIIGRGEVNYDSETLMPMLGMKTQELPDDMQRPVVHADYLSNYASRA

SEQ ID NO: 51971 - protein, 315 aa, Zea mays
MAKLQVTPGAAFTECNELNFQGLYMYHTPLGPKANQAAILESKAKIGIGATVVNNWAVYDGPGPGAKLVGRAQGLHILAGNWVNSFTLVFEDERFSGSTLEVRGITVETGEWAVVGGTGQFAMANGIISKKFHEQRSDGNVIELSVHAFCPLLKGKRGGAVTKVGPWGGSGGSPMELTETETPMRLESITVRSGVAVNSISFSYVDSAGHKRSAGPWGGSGGQPDQVQLAESEVVTQVSGTYGTIDDDDRTVITSIKFVTNLDKTYGPFGAYGDGDDTSFTVPVQPGSGAIVGFFARVGGAGDYLDAIGVYVRPL

SEQ ID NO: 51972 - protein, 264 aa, Arabidopsis thaliana
METDKRWSLAGKTALVTGGTRGIGRAVVEELAKFGAKVHTCSRNQEELNACLNDWKANGLVVSGSVCDASVRDQREKLIQEASSAFSGKLNILINNVGTNVRKPTVEYSSEEYAKIMSTNLESAFHLSQIAHPLLKASGVGSIVFISSVAGLVHLSSGSIYGATKGALNQLTRNLACEWASDNIRTNCVAPWYIKTSLVETLLEKKEFVEAVVSRTPLGRVGEPEEVSSLVAFLCLPASSYITGQVISVDGGFTVNGFSYAMKP

SEQ ID NO: 51973 - protein, 362 aa, Schizosaccharomyces pombe
DPPLTVSSTQRISRPPSLQKSITMVGVEPLYQSNGNEKSSKYNVFSESAHGNHQVLSFSPGSSPSFIEQPSPISPTSTTSEDTNTLEEDTDDQSIKWIRGALIGSGSFGQVYLGMNASSGELMAVKQVILDSVSESKDRHAKLLDALAGEIALLQELSHEHIVQYLGSNLNSDHLNIFLEYVPGGSVAGLLTMYGSFEETLVKNFIKQTLKGLEYLHSRGIVHRDIKGANILVDNKGKIKISDFGISKKLELNSTSTKTGGARPSFQGSSFWMAPEVVKQTMHTEKTDIWSLGCLVIEMLTSKHPYPNCDQMQAIFRIGENILPEFPSNISSSAIDFLEKTFAIDCNLRPTASELLSHPFVS

SEQ ID NO: 51974 - protein, 374 aa, Corynebacterium diphtheriae NCTC 13129
MSHSTPVTVLSGFLGSGKTTLLNQMLSNRESKKIAVIVNDFSEINIDAALIAGEGHLERGEDKFVELTNGCICCTLRDDLVQSVGALASSGDYDHIVIESTGISEPMPVAATFEWVWDDGTRLADIAPIDTMATLVDASQFLTYMGKKTYLTDRDLGVTEDDERTIADLLVDQVEFADKIYITKSDLVDDERYHATKALVRRMNPRASIDKLVNGRVITASGENRNAINDLLGAMCYDEETARTYQGYVAELDNPHTPETEEYGISSFVFKGDRPFDRQRLIAALRSTRGIVRSKGHCWISDRIDMVQVWHQAGPDLRIAPAGYWQSAGITPSNEIVVIGVNFDHAQAQQLLNDAMLSDSEVQQLLSTADAAKS

SEQ ID NO: 51975 - protein, 346 aa, Ricinus communis
MSKAGALDLASGVGGKIDKNEVLSAVEKYEKYHVYYGGAEEERKANYTDMVNKYYDLVTSFYEFGWGESFHFAHRFKGESLRESIKRHEHFLALQLGLKPEQKVLDVGCGIGGPLREISRFSLTSVTGLNNNEYQITRGKVLNRIAGVDKTCDFVKADFMKMPFPANSFDAVYAIEATCHAPDAYGCYSEIYRVLKPGQFFAAYEWCMTDSFDPNNQEHQKIKAEIEIGDGLPDIRLTGQCIEALKKAGFDVIWSGDLTASSPVPWYLPLDKNQYSLTGFRLTAIGRFFTRNMIKALEFAGLAPKGSQRVQDFLEKAAEGLVEGGRKEIFTPMFFFLAQKPHSENQ

SEQ ID NO: 51976 - protein, 631 aa, Borrelia garinii PBi
MSDLEKKYSKLIEGIVTHLGDRKSLSFSELSNLLPDDILEPEILDFICSILEDRGIILVNKISELDLVGTEDGNDEEEESEIESDRNFMILDDGFQSDEEDIDIDGKLDDCDEEDISVKDDLGSGYIKSNALKDSHSEDPIKLYLKEIGKEFLLTGNQEVELAKQMDSGESIIENILKNEGLVIENYYNLINTIYSRMEREEFFKREKDKDKESNPDYYNKKKRIASFYKIPLKPIQDRLISYVDNKHRVYELGGDIFEKNLKSERLALKELLRDVPLYQDELRIFSDDYIDSANKIKDLQRQQRIILSRLKIEKIRDLRVLGRDLTIAEKRIEIEKSLKLKEDAIKEQITEAQLAQKELERIEMYYEYPMDKIISMSEEIAKGKQMMQHAKDQLIKANLRLVVSIAKKYANRGLHFFDLVQEGNIGLIKAVEKFEYKRGFKFSTYATWWIRQAITRSISDQARTIRVPVHMIEQINRLNRETRYLVQVLGKDPTDEELSDRLGWELKKVKTVKSVSREPVSLETPIGEEEDSVLSDFIEDKAIKNPANHTSFVVLQDQIRSILGTLPEREQEVVKMRFGLEDGYSLTLEEVGLHFNVTRERIRQIESKALRRLKNPKKTQKLKDYLEDLN

SEQ ID NO: 51977 - protein, 244 aa, Zea mays
  misc_feature (26)..(26): Xaa can be any naturally occurring amino acid
  misc_feature (48)..(48): Xaa can be any naturally occurring amino acid
  misc_feature (69)..(69): Xaa can be any naturally occurring amino acid
  misc_feature (241)..(241): Xaa can be any naturally occurring amino acid
  unsure (1)..(244): unsure at all Xaa locations
MSSYEPMRVFVNTLTGQNHLCLMVQXSDTNNCVKDKIQDKEGSAPDQXCLIFAGNQLEDGRALADYNIXQKESTLHLVLRLRVGMQIFVKTLTGKTITLEVESSNTIDNVKAKIQDKEGIPPDQQRLIFAGKQLEDGRTLADYNIQKESTLHLVLRLRGGMQIFVKTLTGKTITLEVESSDTIDNVKAKIQDKEGIPPDQQRLIFAGKQLEDGRTLADYNIQKESTLHLVLRLRGGMPIFXKTL

SEQ ID NO: 51978 - protein, 319 aa, Zea mays
MPAFKAPAPGFAVRFSPFHENRLLAATSQHFGLVGNGHLIVLDLAGGGPGAAPAPVFSFPTSDALFDCAWSESHDSLCAAASGDGSVRLFDAALPPAQNPVRLLREHAREVHGLDWNPVRRDAFISASWDDTLKLWSPDRPASVRTFRGHEYCVYAAAWSARHPDVFASASGDRTARVWDVRDPAPTLILPAHDHEVLSLDWDKYDPSILATASVDKSIRVWDVRAPRAPIAQLAGHSYAVKRVRFSPHRQGMLMSCSYDMTVCMWDYRAEDALLARYNHHTEFVAGIDMSVLVDGLLASTGWDEMVYIWPFGTDPRAM

SEQ ID NO: 51979 - protein, 793 aa, ASPERGILLUS NIDULANS FGSC A4
MTKDGSVVYPRMSKKGPFTVEAPGVEPVPGETVPRRHPRAKDGLLLRPAEDLATTYDAFRWAARSYGNAKAVASRRLIKTHIETKKVKKVIDGVEQEVDKQWTYFEKGPYSYKSFIEYETLALELGKGLRKIGLNKGDKVHLYGATSANWLAMSHGSYSRFPNFSKGSASQSLTVVTAYDTLGEEGLAHSIVQTESDAIFLDPTLIKSLTNVLDRAKSIKHVIWNSDEELKQEDMDRLKTEFSHLNILSFEDLRKLGEENHYDPVPPAPEDLCCIMYTSGSTGPPKGVPLTHANVVAAMAGVDAIIGPYVGPSDALLTYLPQSHILEFMFENLCLFWGGTMGYGNPRTLSDASMRNCKGDIREFRPTILVGVPAVWESVKKGVLNNLNKNSALVKGLFWGALSAKNFLMSTGFPGASMGAWFLDNVIFRKLKDATGGRLRVVMNGGGPVSKETQKFLSMAIAPMISGYGLTETSAMGALNDPGAWNPNALGEIPACIEVKLVDFADAGYFTKNNPPQGEIWIRGGSVSTHYFKNEEETKAAYAEGGWFMTGDIGEFDKNGHLKIIDRKKNLVKTQNGEYIALEKLESVYRSSPIVGNICVYAAEDQDKPIAIIVPVEIALKKIASENGIEGDSVETLVHNEKLKSIVLKQLQTAGRASGLKGIEIINGVVLSDEEWTPQNGFMTAAQKLQRKKIINSSNKKAEETGTIEYNQRLRNIDLSRFHLDYELTPALSPNFRFASRSCVSHSYKSLSPKTRAIFGVGVMVWASIGLWTSSQVEQAMGMVPYGGGEGGA

SEQ ID NO: 51980 - protein, 159 aa, Helianthus annuus
EFQVGPSVGISAGDEIWAARYILERITEIAGVVVSFDPKPIPGDWNGAGAHTNYSTKSMREEGGYEIIKKAIEKLGLRHSEHIAAYGEGNERRLTGRHETANINTSKWGVANRGASIRVGRDTEKEGKGYFEDRRPASNMDPYVVTSMIAETTILYVNP

SEQ ID NO: 51981 - protein, 458 aa, Nostoc sp. PCC 7120
MTFDYDLFVIGAGSGGLAASKRAASYGAKVAIAENDLVGGTCVIRGCVPKKLMVYGSHFPALFEDAAGYGWQVGKAELNWEHFITSIDKEVRRLSQLHISFLEKAGVELISGRATLVDNHTVEVGERKFTADKILIAVGGRPIKPELPGMEYGITSNEIFHLKTQPKHIAIIGSGYIGTEFAGIMRGLGSQVTQITRGDKILKGFDEDIRTEIQEGMTNHGIRIIPKNVVTAIQQVPEGLKISLSGEDQEPIIADVFLVATGRVPNVDGLGLENAGVDVVDSSIEGPGYSTMNAIAVNEYSQTSQPNIYAVGDVTDRLNLTPVAIGEGRAFADSEFGNNLREFSHETIATAVFSNPQASTLGLTEAEARAKHGDDAVTIYAPFRPMYHSFTGKQERIMMKLVVDTKTDKVLGAHMVGENAAEIIQGVAIAVKMGATKKDFDATVGIHPSSAEEFVTMR

SEQ ID NO: 51982 - protein, 260 aa, Zea mays
MGRSPCCEKAHTNRGAWTKEEDERLVAYVRAHGEGCWRSLPRAAGLLRCGKSCRLRWINYLRPDLKRGNFTADEDDLIVKLHSLLGNKWSLIAARLPGRTDNEIKNYWNTHIRRKLLGSGIDPVTHRRVAGGAATTISFQPSPNTAVAAAAETAAQAPIKAEETAAVKAPRCPDLNLDLCISPPCQHEDDGEEEEEELDLIKPAVVKREALQAGHGHGHGLCLGCGLGGQKGAAGCSCSNGHHFLGLRTSVLDFRGLEMK

SEQ ID NO: 51983 - protein, 550 aa, Methylococcus capsulatus str. Bath
MRGPLLLNYPLFNKGPAFPEQERRELGLLGLLPPHVDTLETQVERAYEAFRAKPTDLERHIYLRALQDENEVLFYRLMQDYIGETMPVVYTPTVGEACQRFSHIYRHPRGLFIAYPEREHIDELLANTAQREVDVIVVTDGERILGLGDQGAGGMGIPIGKLALYTLCGGIHPARTLPVLLDVGTDNPDLLNDPLYMGWRHPRVRGTEYDEFVERFVQAVMRRYPNVLLQWEDFAQANAGPLLERYRDRLCTFNDDIQGTAAVATGTVLAAVKVTGTRLRDQVVAVFGAGSAGCGIAEQICAAMVRDGLSETEARSRCFLIDRSGLLREGLSGLPPFQQAFAQPAARLAGWRVDRAGTIGLAEVVNNARPSVLIGVSGAAGAFTESIVKAMADYTPRPIILPLSNPTSRCEALPAQILAWTEGRALVATGSPFADVAWEGRTIPIPQCNNSYIFPGLGLGILAIGARRVTPGMFMAAAQALANASPAATDPHGPLLPPLTAIRNVSRLIALAVAKEAVAAGVAAPASDADLERMVDERMWTPAYARLTGC

SEQ ID NO: 51984 - protein, 293 aa, Bacillus clausii KSM-K16
MVKRKVAVIGSINMDMVTSTDHVPAQGETVMGKGFKTVPGGKGANQAVAAARLGADVRMIGRVGDDAFGELLKQGLQDEGVCVDHVEPVTHCSSGVATILLSDGDNRIIVTAGANEYVNEAFLSTCEEVIADSDIVLIQLEIPLKAVEYAIALCKKHQVPVILNPAPAQKLSQQTYENSTWITPNESEQAQLFANTNVHLKEKLIVTQGAAGVIWTENGVEQRIAGHRVMPVDTTGAGDTFNGALAVALASGKPMREAVMYANAAAALSVQSFGAQGGMPSKEEVAAFLLERQ

SEQ ID NO: 51985 - protein, 359 aa, Corynebacterium glutamicum ATCC 13032
MANTSSDWAGAPQNASADGEFVRDTNYIDDRIVADVPAGSEPIAQEDGTFHWPVEAGRYRLVAARACPWAHRTVITRRLLGLENVISLGLTGPTHDVRSWTFDLDPNHLDPVLQIPRLQDAYFNRFPDYPRGITVPALVEESSKKVVTNDYPSITIDFNLEWKQFHREGAPNLYPAELREEMAPVMKRIFTEVNNGVYRTGFAGSQEAHNEAYKRLWVALDWLEDRLSTRRYLMGDHITEADIRLYPTLVRFDAVYHGHFKCGRNKITEMPNLWGYLRDLFQTPGFGDTTDFTEIKQHYYITHAEINPTRIVPVGPDLSGFATPHGREKLGGSPFAEGVTLPGPIPAGEEVKNPEPFQK

SEQ ID NO: 51986 - protein, 331 aa, Yersinia pseudotuberculosis IP 32953
MTIKVGINGFGRIGRIVFRAAQERSDIEIVAINDLLDADYMAYMLKYDSTHGRFDGTVEVKDGHLVVNGKTIRVTAERDPANLKWNEVNVDVVAEATGLFLTDETARKHIAAGAKKVVLTGPSKDDTPMFVMGVNHKAYAGQEIVSNASCTTNCLAPLAKVINDKFGIVEALMTTVHATTATQKTVDGPSHKDWRGGRGASQNIIPSSTGAAKAVGKVIPELNGKLTGMAFRVPTPNVSVVDLTARLEKPASYKEICAAIKAASEGELKGVLGYTEDDVVSTDFNGEKLTSVFDAKAGIALNDNFVKLVSWYDNETGYSNKVLDLISHISK

SEQ ID NO: 51987 - protein, 658 aa, Bordetella bronchiseptica RB50
MAQSLPASATVPAAAQTFPALLLEHASVRGSRPAIREKDLGIWQTLTWSEVAASVRLTAHGLAALGIGPGMHVAVIGENRPRLYIAMMATQALGAIPVPLYQDAVAQEMVYVLQDAEVSVVVVEDQEQADKMLEVREQCPALAHVVYDDPRGMRHYSDPLLRSFEQLEDTGRAHAASHPGFFEQAVAAVRPHDAGAMFYTSGTTGKPKGVVLTHHALIDRARAVAEMENLTDQEDVLAYLPPAWIGQNMFSYTQLLVSGFTVNHPESPETVSIDMRDIGPTYYFAPPRVLEGLLTHVMIRMEDAGYIKRKLFHACMNLARRVGTRILDGQPVGLWDRLRYRLGDALIYGPLRNALGMSRVRVAYTAGEAIGPDLFVFYRSIGINLKQLYGSTETSVFVCVQPDGHVRDDTVGPPVEGVDIRVADNGEILVKSPGLFKEYYRNPEATAEARDDDGWFHTGDAGYLDSDGQLKIIDRAKDVGKLADGSLFAPKYIENKLKFFPYIKEAVAFGNGRDDVCAFINIDLEAVGNWAERRGLPYAGYTDLAGKDEVYALLQDCVEKVNADLAGDARLAASQVGRFLILHKELDPDDDELTRTRKVRRAFIGQKYGVLVDALYGGKDTQFIETEVKFEDGRVGRISADLKIRAARTFPAITAKAA

SEQ ID NO: 51988 - protein, 463 aa, Corynebacterium diphtheriae NCTC 13129
MNNQQPRHYDLIIVGSGSGNSIPGPEFDDKSIAIVEKGKFGGTCLNVGCIPTKMFVYASEIAQVIVDSERFGISASIDSVQWPDIVERVFAHRIDPIAASGEEYRRGDKTPNIDVYDQHARFIAPKTLQIGDGENAPIISGDTIVIATGSRPFIPSYIEESKVTYYTNETIMRMPDLPRSMVVLGGGYIAMEFAHVFSALGVNVTVVNRSPQLLRVLDEDISHRFTEITKTKMDCRLGRTVSSVDQDSNGVTLTLDDGSTATGEVLLVATGRIPNGDQMNLDSAGIDMDGKRIKVDDFGRTTADGVWALGDVSSPYQLKHVANAEMRAVKHNLLHPEDLKSMPHQHVPAGVFTHPQIATVGLTEQEARDAGYSITVKIQNYGDVAYGWAMEDTQHFAKLIADKKTGRLLGAHFIGPQASTLIQQLITVMAFDLDVREVATKQYWIHPALPELTENALLGLDFS

SEQ ID NO: 51989 - protein, 292 aa, Lolium perenne
DRRAAAGKVTKFCRILSPQLAIQHILPCVKELSSDSSQHVRSALASVIMGMAPVLGKDATIEQLLPIFLSLLKDEFPDVRLNIISKLDQVNQVIGIDLLSQSLLPAIVELAEDRHWRVRLAIIEYIPLLASQLGVGFFDDKLGALCMQWLEDKVYSIREAAANNLKRLAEEFGPEWAMQHIIPQVLEKINNPHYLYRMTILQAISFLAPVMGAEITCQKLLPVVINSSKDRVPNIKFNVAKVLQSLVPILDQSVVEKTVKPCLVELSEDPDVDVRYYANQALQACDQIMMSS

SEQ ID NO: 51990 - protein, 107 aa, Hordeum vulgare subsp. vulgare
MAEAAHGGGLRGRGVLLGGVQDAPAGRENDLETIELARFAVAEHNAKANALLEFEKLVKVRQQVVAGCMHYFTIEVKEGGAKKLYEAKVWEKAWENFKQLQEFKPAA

SEQ ID NO: 51991 - protein, 401 aa, Sulfolobus solfataricus P2
MFERFLSTETKYLRTSEIRDLLKLTEGKNVISLAGGLPDPQTFPVEEIKKIADDILLNSADKALQYTATAGISEFRRELVNLSRLRGISGIDERNVFVTVGSQEALFMIFNILLDPGDNVVVEAPTYLAALNAMRTRKPNFISITVTEMGPDLDELERKIKDAHSNGKKVKLMYVIPTAQNPAGTTMNTEDRKRLLEIASKYDFLIFEDDAYGFLVFEGESPPPIKAFDKEGRVIYTSTFSKILAPGLRLGWVIAHEDFIKEMELYKQNVDLHTPSLSQYIAMEAIRRGIIQNNLPKIRRVYKEKRDVMLEAIETYFPNDARWTKPVGGMFVFAWLPQKIDTTKMLEKALQRGVAYVPGSSFYADYSGKNTMRINFSFPKKEELIEGIKRLGDTIKHELST

SEQ ID NO: 51992 - protein, 214 aa, Triticum aestivum
  misc_feature (39)..(39): Xaa can be any naturally occurring amino acid
  unsure (1)..(214): unsure at all Xaa locations
MASSASRFIKCVTVGDGAVGKTCMLICYTSNKFPTDYIXPTVFDNFSANVVADGTTVNLGLWDTAGQEDYNRLRPLSYRGADVFVLAFSLVSRASYENIMKKWIPELQHYAPGVPVVLVGTKLDLREDKHYLLDHPGMIPVTTAQGEELCKQVGALYYIECSSKTQQNVKAVFDAAIKVVIQPPTKQREKKKKKQRRGCSMMNFGGRKMLCFKS

SEQ ID NO: 51993 - protein, 441 aa, Corynebacterium efficiens YS-314
MPSMTADQIVATSGHAAWMLISASLVLLMTPALALFYGGMSRQKSVLNMMMMSFGTLGVVSVIYVLWGWSMSYGTQSWGGIVANPLEFFGLRNSITDAGGNYLEGASGYANIIDIGFQLTFAVISTALISGALAERVKFSTWLTFTALWSTFVYFPLAHMVWGGGLLAHGETGFAAWLFGVTDGEATIAPIDFAGGTVVHISAGTAALVLALIIGARRTFPMVAARPHNLPLVMLGAALLWFGWFGFNGGSAFAADGLAGLAWLNTTAATAAAILGWLATERLRDGHATSLGAASGVVAGLVTVTPAAGALTPLTALILGVIGGILACLGVGLKYRFGFDDSLDVVGVHLVAGLWGTVGVGLLATDAGWFTGGGMDGFRLFIIQIVIAVVAMIFAAVITAVIAYLLKATMGWRIDEDKEQHGIDTAEHGESAYDTAGPEIR

SEQ ID NO: 51994 - protein, 164 aa, Legionella pneumophila subsp. pneumophila str. Philadelphia 1
MGSLRKHQPGKTTDLLMSPFLRLQQEVNHAMSDFYNLFDPQRSANLEQFEHISLTPSLDIVEDKDNFKIEVEMPGMGEEDIKVSFCENRLTIEGEKTTSKKDENKNYISREISYGRYERTISLPLSADVDKATASFKKGMLWITIPKKTEAKENVKTIKIEKAK

SEQ ID NO: 51995 - protein, 186 aa, Synechocystis sp.
RGLSFQDLIQEGSLGLIRAAEKFDHEKGYKFSTYATWWIRQAITRAIADQSRTIRLPVHLYETISRIKKTTKLLSQEMRRKPTEEEIAEKMEMTIEKLRFIAKSAQLPISLETPIGKEEDSRLGDFIEADGETPEDEVSKNLLREDLENVLDTLSPRERDVLRLRYGLDDGRMKTLEEIGQIFNVT

SEQ ID NO: 51996 - protein, 699 aa, Oryza sativa (japonica cultivar-group)
MSPDADAAAAAAAGGEGAAAAGVGTAGEGRGVIRWDQILPRRSLRVLLVEHDDSTRQVVTALLRKCGYRVAAVADGMKAWGVMRERAYAFDLVLTEVTMPTLSGIELLSRIVASDECKNIPVIMMSSQDSIGTVLRCMQKGAVDFLVKPVRKNELRNLWQHVWRRHAMNSQTNASENNAASNHLSANGGNGSKTGEHSDEESDAQSSGSKREVEIQSAEKLPEVVADGGAGSSREHKIQNGFIDGMNTKSHALKGNDDAPSGNACGDSELQVLSTEKNVRSKFLNGITSAKVAGQIMDNALRFADSSSLRSSDPGKDLLVVAQTTADRKCKSSALENNAVMENNLSENSKGTATGHAESCPSHFVEINLEKQHHLNGYTNHKLNEKDIFNHSNSSAFSRYGNKRIESSAQRPFPPSFRVVHQQPVYDKNPQSSRVLLSCEHNTRESTVQAQVPLDRSTEGAAILCSSSVREDAGTSSSSPRKDSLTHPSYGFIPVPIPVGAAIPYHYGAIMQPMYYPQGAFMHCDSAAINKTAIQHVSCQSNYHENLGKPPQIDEHKQPEENHQLHHSRQILRESGEPVDLAKAHMERINQSASCSQDIRKGSGCTGSGETDANTNTVIALESGNESGVQNCSNNVLDGDRSRREAALLKFRMKRKDRCFEKKVRYHSRKKLAEQRPRVKGQFVSQKLKSAITTEAETD

SEQ ID NO: 51997 - protein, 172 aa, Brassica napus
  misc_feature (130)..(130): Xaa can be any naturally occurring amino acid
  misc_feature (137)..(137): Xaa can be any naturally occurring amino acid
  misc_feature (142)..(142): Xaa can be any naturally occurring amino acid
  unsure (1)..(172): unsure at all Xaa locations
MDLASNLGGKIGKSDVLTAVEKYEQYHEFHGGDEEERKANYTDMVNKYYDLATSFYEYGWGESFHFAHRWNGESLRESIKRHEHFLALQLGVKPGQKVLDVGCGIGGPLREIARFSNSSVTGINNNEYSXQISILGXTRRLXSPGFDKTCNFVKADFMKMPFPENTFDAVYA

SEQ ID NO: 51998 - protein, 313 aa, Triticum aestivum
  misc_feature (150)..(150): Xaa can be any naturally occurring amino acid
  unsure (1)..(313): unsure at all Xaa locations
MAESFVLNTGARIPSVGLGTATGKAEPGVVREAVYAAVKAGYRHIDCAPAYRNEKEIGLALKKLFDEGVVKREDLFITSKLWSGNQAPEDVPEGIDTTLQDLQLDYLDLFLIHAPLRSKKGAIPTPENFLPVDIPATWGAMEKLYASGKXRAIGVSNFSCKRMEDLLAIASVPPAVNQVECHPGWQQMKLRELCQSKGVHLSAYSPLGKHGSPGSTGPSFLSNPIVISVAEKLNKTPAQVALRWGLQMGQSVLPKSTNETRIKENLSIFDWSIPEDLMANFSEIQQVKVLRAEFVVHPQGIFKTVEDFWDGEI

SEQ ID NO: 51999 - protein, 137 aa, Yersinia pseudotuberculosis IP 32953
MAKELNPTENIEKLSDIQRYVTQERGTEAPFTGKLLHNKRDGVYQCLCCHQPLFISESKFDSGCGWPSFYQPIDADSIRYIDDYSHNMHRIEIRCGNCDAHLGHVFPDGPQPTGERYCINSASLNFVDDQNGEQTAG

SEQ ID NO: 52000 - protein, 715 aa, Neurospora crassa
SKKVDDLKNEFKETDKSARLTTDYGVKQTTADDWLRIVSDDKIGPSLLEDPFARERIMRFDHERIPERVVHARGSGAFGKFKVYESASDLTMAPVLTDTSRETPVFVRFSTVLGSRGSADTVRDVRGFAVKFYTEEGNWDLVGNNIPVFFIQDAIKFPDVIHAGKPEPHNEVPQAQSAHNNFWDFQFNHTEATHMFTWAMSDRAIPRSLRMMQGFGVNTYTLINAQGKRHFVKFHWTPELGVHSLVWDEALKLAGQDPDFHRKDLWEAIENGAYPKWKFGIQAIAEEDEHKFDFDILDATKIWPEDLVPVRYIGEMELNRNPDEFFPQTEQIAFCTSHVVNGIGFSDDPLLQGRNFSYFDTQISRLGVNFQELPINRPVCPVMNFNRDGAMRHTISRGTVNYYPNRFDACPPASLKEGGYLEYAQKVAGIKARARSAKFKEHFSQAQLFYNSMSPIEKQHMINAFGFELDHCEDPVVYGRMVQRLADIDLGLAQTIAEMVGGEAPTTTNHPNHGRKTINLSQTEFPPATPTIKSRRVAIIIADGYDNVAYDAAYAAISANQAIPLVIGPRRSKVTAANGSTVQPHHHLEGFRSTMVDAIFIPGGAKAAETLSKNGRALHWIREAFGHLKAIGATGEAVDLVAKAIALPQVTVSSEAEVHESYGVVTLKKVKPESFTDAVKIAKGAAGFLGEFFYAIAQHRNWDRELDGLHSMIAY

SEQ ID NO: 52001 - protein, 338 aa, Corynebacterium glutamicum ATCC 13032
MAIELLYDADADLSLIQGRKVAIVGYGSQGHAHSQNLRDSGVEVVIGLREGSKSAEKAKEAGFEVKTTAEAAAWADVIMLLAPDTSQAEIFTNDIEPNLNAGDALLFGHGLNIHFDLIKPADDIIVGMVAPKGPGHLVRRQFVDGKGVPCLIAVDQDPTGTAQALTLSYAAAIGGARAGVIPTTFEAETVTDLFGEQAVLCGGTEELVKVGFEVLTEAGYEPEMAYFEVLHELKLIVDLMFEGGISNMNYSVSDTAEFGGYLSGPRVIDADTKSRMKDILTDIQDGTFTKRLIANVENGNTELEGLRASYNNHPIEETGAKLRDLMSWVKVDARAETA

SEQ ID NO: 52002 - protein, 106 aa, Brassica napus
MGLISSPSVDESHYHTHKIFLFANYILLGTASSCIFLTLSLRLIPSVCGFLLILLHATTIAAAISGCTAASCGRNRWYAAHMVATVLTAIFQGSVSVLIFTNTANF

SEQ ID NO: 52003 - protein, 558 aa, Brassica napus
  misc_feature (444)..(444): Xaa can be any naturally occurring amino acid
  unsure (1)..(558): unsure at all Xaa locations
MKSHMVWFLFLVSFLSVFPAPSESMVRHYKFNVVMKNITRLCSSKPTVTVNGRYPGPTIYAREDDTLLIKVVNHVKYNVSIHWHGVRQVRTGWADGPAYITQCPLQPGQVYTYNYTLTGQRGTLWWHAHILWLRATVHGAIVILPKRGVPPPVPPPVREKVIVLAEWWKSDTENVINEALKSGLASNVSDAHMINGHSGPVNNCPSQGYKLSVTNGKTYLLRLVNAALNEELFFKVAGHLFTVVEVDAVYVKPFKTDTILIAPGQTTNVLLTTSKSAGKYLVTASPFMDSPIAVDNVTATATVHYSGTLSSSPTTLTLPPPQNATTIANNFTNSLRSLNSKKYPALVPTTIDHHLFFTVGLGLNPCPTCKAGNGSRVVASINNVTFTMPKTALLPAHYFNISGVFTTDFPKNPPHVFNYSGGSVTNMATETGTRLYKLPYNATXQLVLQDTGVIAPENHPIHLHGFNFFEVGRGLGNFNAKKDPSNFNLVDPVERNTIGVPSGGWVVIRFRADNPGVWFMHCHLEVHTTWGLKMAFLVENGKGPNQSILPPPKDLPKC

SEQ ID NO: 52004 - protein, 365 aa, Rubrobacter xylanophilus DSM 9941
MNERLKRLQEIGQSVWVDSLSREDVVEGGLRRLVEEGVSGVTSNPTIFQQAISGSPLYDEQLRELAGEEEPREVFFRLAREDIRGACDVLMPVYERTGGEDGYVSLEVSPDLAYDTEGTVEEAQRLHEMVERPNLLVKIPATREGLPAIEEMISRGRSINVTLIFSLGRYREVAGAYIRGLRRLVGSGGDPSRVASVASFFVSRVDTEADRRLEAAGRPELKGRLAVANAKLAYQEFKRIFSGPEWERLASAGARVQRPLWASTSTKNPEYSDVKYVEELVGPQTVNTMPHSTLRATMDHARVRPTLEEGLEEARKTFALVREAGVDYDDLTRVLEEEGVRKFADSFQELLREIEQKGRRLVRQG

SEQ ID NO: 52005 - protein, 626 aa, Rubrobacter xylanophilus DSM 9941
MAHVNQKTVDATTLRELAQQLRVDSIRASTTAGSGHPTSSMSAADLMAVLMARYLRYDFDDPENPLNDRLVFSKGHASPLLYSMYKAAGAITDEELLSFRKFGSPLQGHPTPALRWVDVATGSLGQGLPIGVGLALAGKHLDRLPYRVWVLCGDSEMAEGSMWEAFQHAAHYGLDNLVAVLDMNRLGQTRETMDGWNGDAYAGRARAFGWHAIQIDGHDVEEIDRAYAEALEQDKPVLVIARTRKGRGVSFLEDQLGKHGKPVPPEQAEQAIEELGGERSITVEVPRPDRRPQPPVRDGFTGEYRPKRWEVGDSEATRTAYGEGLKALGAAREDVVVMDGEVSDSTRAQKFAEAYPDRYFEMFIAEQQMVATAVGMSVRGYVPFASSFAAFLTRAHDFIRMAAISGANLRLCGSHAGVSIGPDGPSQMGLEDLAMMRSLHGSTVLYPCDANQTVKLVREMAGLEGISFLRTTRDSTPVIYPADEEFPVGGSKVVRSSEEDAVTVVAAGITVHQALRAAEELQGEGIRVRVIDAYSVKPIDARTLISSARQTAGRVVVAEDHWPEGGLGEAVLSAFAENGALDGLRLRHLAVSGMPGSGKPQELLDAAGIGFGDIAGAVRSLLDGRA

SEQ ID NO: 52006 - protein, 418 aa, Escherichia coli
MRGSHHHHHHGSMKRVVITGLGIVSSIGNNQQEVLASLREGRSGITFSQELKDSGMRSHVWGNVKLDTTGLIDRKVVRFMSDASIYAFLSMEQAIADAGLSPEAYQNNPRVGLIAGSGGGSPRFQVFGADAMRGPRGLKAVGPYVVTKAMASGVSACLATPFKIHGVNYSISSASATSAHCIGNAVEQIQLGKQDIVFAGGGEELCWEMACEFDAMGALSTKYNDTPEKASRTYDAHRDGFVIAGGGGMVVVEELEHALARGAHIYAEIVGYGATSDGADMVAPSGEGAVRCMKMAMHGVDTPIDYLNSHGTSTPVGDVKELAAIREVFGDKSPAISATKAMTGHSLGAAGVQEAIYSLLMLEHGFIAPSINIEELDEQAAGLNIVTETTDRELTTVMSNSFGFGGTNATLVMRKLKD

SEQ ID NO: 52007 - protein, 242 aa, Rubrobacter xylanophilus DSM 9941
MRLRVLEDPAALAAAAAREFAARAAHAVRARGRFAVALAGGSTPKAAYELLATEHAGGVDWRRVHFFFGDERPVPPDHPDSNYRMAREALLSRVPAGSVHRMRGELPPGEAARRYEEELRGFFAGERVPRFDLILLGLGEDGHTASLFPHTEALDETTRLAAANPVPELGTTRITLTLPVINAARAVIFLVSGGGKAEALRAVLGGPAGGEDPRRYPAGLVRPGGEMLWLVDRPAAALLNGG

SEQ ID NO: 52008 - protein, 678 aa, Arabidopsis thaliana
MSKKHLKPLETCFEDEEDDVIYLPPGLVTGATSKKNEEFCGGSGKVQPSEMKRRSEGTSTDMTSKRAKKVSAEDEKKVGEWTKNPYFQRLWSEEDEIVMLQGIIKFEDVTGKSPFEDRHGFIEFVKNSISFEASVQQYIGKISQLKRKYTRKRKNGFSEGHEQKCFKLAMSIWGTKETSKKTDLCSSPKGKKVKEEDGDVTNSDWFENSFLLPSIESLGVDSVKRKWNVVPMEFKKKIEERLELLEADESECKKMEEMLKVKNSECVKQKTNLLNELLQDAVPNICVSRLRFPAMALQATTTTFCFSGPTFRSTPHSLTSKRPISIKATTSSPSRLSNSRSNLKGRALSSDGSTQESPYVVCFGEMLIDFVPTTSGLSLADAPAFKKAPGGAPANVAVGIARLGGSSAFIGKVGEDEFGYMLANILKDNNVNNDGMRFDPGARTALAFVTLTNEGEREFMFYRNPSADMLLEESELDFDLIKKAKIFHYGSISLITEPCKSAHISAAKAAKEAGVILSYDPNLRLPLWPSADNAREEILSIWETADIIKISEEEIVFLTKGEDPYDDNVVRKLFHPKLKLLLVTEGPEGCRYYTKDFSGRVHGLKVDVVDTTGAGDAFVAGILSQLANDLSLLQDEERLREALMFANACGALTVKVRGAIPALPTKEAVHEALLKAVV

SEQ ID NO: 52009 - protein, 109 aa, Methanococcus vannielii
MSNIGIDVKAPENVCEDVNCPFHGTLSVRGQIFEGVVSGDKGHNTIVIKREVTGYISKYERYEKRTTSLVAHNPPCINAKTGDVVKVMECRPVSKTKSFVVIEKTENLE

SEQ ID NO: 52010 - protein, 418 aa, Gluconobacter oxydans 621H
MNRALQAAAIGAGTATVVTVGLMLALRGHGNTAQPVPHPAQQPQKPLVMQAPAPKMLPTIIPDRTVAGENTDAQGIPTQPAVVPAPAPALPPLLVKYGPLSFAPLVRQVIPAVVNIAITQNRPDGHDHIPPQIRGTPLEKRYRDRMKRQQEEMVGAGSGFIVDPSGIIVTNRHVVGGADKVVVSLSNGHEMPARLLGADPLTDIAVIKVDSPEPLPHVTWGDSQQTDIGDWILVAGNPFGFGSSVTAGIVSAVGRDLGIGSLDDFIQLDAPINPGNSGGPAFNMRGQVVAVNAAIVTPAGGSVGIGFGIPSEIVAPIVAEIEATGHAEHGWLGITLDDGDTDIGIAGVDNGGPAQKGGLRRGDIVTQVDNVPVTSARMLLRSIAAARPGMTLTFRIQRGKKTLMLPIHIGPRPQDADD

SEQ ID NO: 52011 - protein, 396 aa, Campylobacter jejuni RM1221
MQKLVENLALKYYDKVVDLRHQIHMHPELEFEEENTAHLVCKILDEFGIKYQKNIAKTGILAIIEGKKKSQKKPKCVLLRADMDALPVQEKTNLSYASKIDGKMHACGHDGHTAGLLGAALILNELKDEFCGTIKFMFQPAEEGSGGAKPMIESGVLENPYVDAVFGCHLWGPLLENTAQIVSGEMMAGTDIFDLEFIGRGGHGAHPHTCIDPIIMTTQFVNNIQSVISRRLAPYEAGVITVGQICAGTTYNVIPTNAYLKGTVRFLNDKTQDILKSSLEEVAAATAKSNGGDYKLKYTKEFPPLINDEKAVLIARKAFAKVLGEENIIVSSKPDMGAEDFAFLTRERMGAYVFVGISKDLNHPALHHSSTFCWDDENLKVLMQGDVMMALEFLNL

SEQ ID NO: 52012 - protein, 676 aa, Escherichia coli O157:H7 EDL933
  misc_feature (156)..(156): Xaa can be any naturally occurring amino acid
  misc_feature (161)..(161): Xaa can be any naturally occurring amino acid
  unsure (1)..(676): unsure at all Xaa locations
MKLAACFLTLLPGFAVAASWTSPGFPAFSEQGTGTFVSHAQLPKGTRPLTLNFDQQCWQPADAIKLNQMLSLQPCSNTPPQWRLFRDGKYTLQIDTRSGTPTLMISIQNAAEPVANLVRECPKWDGLPLTLDVSATFPEGAAVRDYYSQQIAIVKXGQITXQPAATSNGLLLLERAETDASAPFDWHNATVYFVLTDRFENGDPSNDQSYGRHKDGMAEIGTFHGGDLRGLTNKLDYLQQLGVNALWISAPFEQIHGWVGGGTKGDFPHYAYHGYYTQDWTNLDANMGNEADLRTLVDSAHQRGIRILFDVVMNHTGYATLADMQEYQFGALYLSGDEVKKTLGERWSDWKPAAGQTWHSFNDYINFSDKTGWDKWWGKNWIRTDIGDYDNPGFDDLTMSLAFLPDIKTESTTASGLPVFYKNKTDTHAKAIDGFTPRDYLTHWLSQWVRDYGIDGFRVDTAKHVELPAWQQLKTEASAALREWKKANPDKALDDKPFWMTGEAWGHGVMQSDYYRHGFDAMINFDYQEQAAKAVDCIAQMDTTWQQMAEKLQGFNVLSYLSSHDTRLFREGGDKAAELLLLAPGAVQIFYGDESSRPFGPTGSDPLQGTRSDMNWQDVSGKSAANVAHWQKISQFRARHPAIGAGKQTTLSLKQGYGFVREHGDDKVLVIWAGQQ

SEQ ID NO: 52013 - protein, 268 aa, Mannheimia succiniciproducens MBEL55E
MARFETLFAQLNAKKQGGFVPFVTLCDPDLERSFDIICTLVDNGADALELGFPFSDPLLDGPVIQAANNRALNAGCSTAESFKLLEKVRSKYPEIPIGLLLCANLIYAQTLDGFYRRCAEIGIDAVLVADIPLLAAEPYIQAAKKHGIQPVFICPPNADENTVKGVAEHSEGYTYLVSRAGVTSAENQSHAANLDSLVEQLKAHNAPPILQGFGIAKPQQVKEALNMGVAGAISGSATVKIIEANLDNHEKCLADLAEFVKNMKAATL

SEQ ID NO: 52014 - protein, 178 aa, Erwinia amylovora
  misc_feature (10)..(10): Xaa can be any naturally occurring amino acid
  unsure (1)..(178): unsure at all Xaa locations
MATEYAMIAXGCFWCTEAVFKQINGVESVESGYIGGHTENPTYKQVCNGDTGHAEAIRIGFDPEKVSFGDLLDISFATHDPTQLNRQGNDIGTQYRSAIFPTSAQQAEEAIAAIARARSEYSDPIVTSIEAGAAWYPAEDCHQDYWAGEGQENRYCLAVIPPKLQKLRKRFAAYAVSE

SEQ ID NO: 52015 - protein, 333 aa, Zea mays
MAFLNMEQQTWAFTFGILGNIISLMVFLSPLPTFYRVYRKKSTEGFQSTPYVVTLFSCMLWIFYALLKSGAELLVTINGVGCVIEAAYLAAYLVYAPKAARALTAKMLLGLNVGVFGLAALATMVVSSAGLRVRVLGWICVSVALSVFAAPLSIMRQVVRTKSVEFMPISLSFFLVLSAVIWFAYGALKRDVFVAFPNVLGFVFGVAQIALYMAYRNKEPAAVTVEEAKLPEHAKEVVVAAAAAEARASCGAEVHPIDIDIEATPTPVEEVHEPQVVVVVDVDVEPVTCAGAAEAAAGAGADASGVADGGVPGPMAPPEQLAIKPDMAISVEA

SEQ ID NO: 52016 - protein, 539 aa, Beta vulgaris
MEGRNVKNGDTNNNKIVGSSLSIEKNPISPPEASSLKKLALVASIAAGVQFGWALQLSLLTPYVQLLGIPHTWAPYIWLCGPISGMIVQPTVGYYSDRCTSKFGRRSPFIAVGATLVGFAVSLIGFAADIGHATGDPNGNVPKPRAIAVFVVGFWILDVANNTLQGPCRALLADMAAGSQAKTRYANAFFSFFMALGNIGGYAAGSYSRLYTVFPFTHTKACDTYCANLKSCFFISITLLIVLTILALSVVRERPFTLDEIQEEENLKNNTGGCARLPFFGQLFGALKDLPKPMLILLLVTCLNWIAWFPFLLFDTDWMGKEVYGGTVGEGKAYDMGVHAGALGLMINSVVLGIMSLGIEKLARLVGGVKRLWGIVNLILAVCLAMTILVTKSAEHYRATHHVPGAIGPPLPPPGFKGGALAIFSVLGIPLAITFSIPFALASIFSASSGSGQGLSLGVLNLAIVVPQMFVSVTSGPWDALFGGGNLPAFVVGAVAATASAILSFTLLPSPHRKPKSEGQWVAIKNKEAVLIFNFLFFI

SEQ ID NO: 52017 - protein, 338 aa, Glycine max
MFSLLKEEKEPITILVTGAAGQIGYALVPMIARGAMLGPNQPMILHMLDIEPATESLKGLKMELIDAAYPLLRGVVATTDVVEACKDVNIVVMVGGFPRKEGMERKDVMSKNVSIYKAQASALEQHAATDCKVLVVANPANTNALILKEFAPSIPEKNITCLTRLDHNRALGQISERLNVLVSDVKNVIVWGNHSSTQYPDVNHATVTTNSGEKPVRELVVDDNWLNNEFITTVQQRGAAIIKARKQSSALSAASAACDHIRDWVLGTPKGEWVSMGVYSDGSYGIPTGLIYSFPVTCERGDWNIVQGLKIDQFSREKMDKTAQELIEEKTLAKSCLN

SEQ ID NO: 52018 - protein, 458 aa, Elaeagnus umbellata
MQIFVKTLTGKTITLEVESSDTIDNVKAKIQDKEGIPPDQQRLIFAGKQLEDGRTLADYNIQKESTLHLVLRLRGGMQIFVKTLTGKTITLEVESSDTIDNVKAKIQDKEGIPPDQQRLIFAGKQLEDGRTLADYNIQKESTLHLVLRLRGGMQIFVKTLTGKTITLEVESSDTIDNVKAKIQDKEGIPPDQQRLIFAGKQLEDGRTLADYNIQKESTLHLVLRLRGGMQIFVKTLTGKTITLEVESSDTIDNVKAKIQDKEGIPPDQQRLIFAGKQLEDGRTLADYNIQKESTLHLVLRLRGGMQIFVKTLTGKTITLEVESLDTIDNVKAQIQDKEGIPPDQQRLIFAGKQLEDGRTLADYNIQKESTLHLVLRLRGGMQIFVKTLTGKTITLEVESSDTIDNVKAKIQDKEGIPPDQQRLIFAGKQLEDGRTLADYNIQKESTLHLVLRLRGGDF

SEQ ID NO: 52019 - protein, 428 aa, Photorhabdus luminescens subsp. laumondii TTO1
MIINNRNESQPRRVVVTGLGVVAPTGVGVNEFWNNIHNGKSGVSKYEWGRERFGFKSGAIGQVYGSDGNNKEFVLKSERKYLQFALDAAEMAMQDANLRPSDIDGRRFGVAIATAIADAAGMEECLLRITKGGKENIHPDLIKSEDYDSFDFSSAATSVAKKYGASMSVSNISTGCAAGLDALGIAMEHIRYGRADIMLAGASEAPLCPLSIGSFEALGALSSRELENQQAATCPFSLERDGFVIAEGCGILILESYEHAKQRGAHIYAELAGYASVNNAYHMTDLPADGMAMARCIDMALKDAQISPSTVNYISAHGSSTAQNDINESNAIKFVLGESAFGIPINSLKSMTGHALAAANAIESVALCLEIEKQYVHPTINYQTPDPDCDLDYIPNQGCSYPIKTALKLSSGFSGIHSVIVMRAVDNA

SEQ ID NO: 52020 - protein, 430 aa, Zea mays
MTGTVSKLAAPRPAAPPLRPASIRAAAIAFAPSPRRVSVSVAGRARIPSVIAMASAKEGNGAPTKKTSLHDLYELQGLSPWYDNLCRPVTDLLPLIASGVRGVTSNPTIFQKAISSSSAYDDQFKQLISGGKDAESAYWELVIKDIQDACSLFEPIYDETDGADGYVSVEVSPRLANDTQGTVEAAKWLHKVVNRPNVYIKIPATAECVPSIREVIANGISVNVTLIFSIATYEAVIDAYLDGLEASGLSDLSRVTSVASFFVSRVDTLIDKMLEKIGTPEALALRGKAAVAQAKLANRLYQKKFSGPRWEALAKKGAKKQRLLWASTGVKNPAYPDTLYIDSLIGPDTVNTMPDQALQAFIDHGTVSRTVDANVSEAEGVYSALEKLGIDWAEVGKQLELEGVDSFKKSFDSLLVSLQEKGNSLKTATV

SEQ ID NO: 52021 - protein, 430 aa, Legionella pneumophila str. Lens
MKRRVAITGLGVVSPLGNDVSTTWNNLIAGHSGIDSIKQFDASAFPTTIAAEVKNFSPDTSISGKHTRFIMSFTHFALEAARQAFEDASIFPTRQTSDRWGIVTGSGMMTAEFDYLTRFQQTCAAGGEIDWGKLQANSRDFYNLVDFGKTTSNSGLSLLIQQYGITGYASSVHTACASGGQALGLAMQVIRRGEADFMLAGGFDSMINPLGLSSFCLLGALSTYNETPQTASRPFDATRNGFVLGEGAAFLILEEWSKAKARGAKIYAELAGEGNSLSSYRITDSHPNGDGAIQAIKRALEDAGVQPRDVDYINAHGTSTKMNDLSETNAIKVVFGDRIANLPVSSTKSQTGHLIAAAGALEAVLSVKSIEQAQVPKTANLKTPDPECDLDYVVDGPREKSLGVVLSNSFGFGGSNSCLLFKHPEFEEAK

SEQ ID NO: 52022 - protein, 834 aa, Debaryomyces hansenii CBS767
MVNLSSSKFHITEPADEDIQLTLVNGNQKGHEDSCNRSSTPKFGSISRFFFNKEQSVSSDVSNADSTVSSNTDSLNHNHGSKSGVTNSEAREDEHDDAKQQPGLSKLKSFLRLSSNSLLLSNNGPNDNGEQNGPKGTDVITPNAESVTPVRSNEEKTKLKHESDRNEEGHNGNKDGSNVSTKQEASAGMMKKFMLGRKRSVSSPTSPATGNRKPQQSNLLINTESPKDIPEIITENTESPVISSNLYFAHQGLPPHMNNHNKNNHTLAASAANEDDISVALRHNDSVFSLNDGGPLKPPNVYQSKLSASDESGSEHEPIPEHTTESGLKTPEESTLQNKNKLEVPPHTLPHPGQASPFQKTLRRVASAPLVHRLLNDSNTRLPQTRAYVSNDDDFDITEHIGELKSGRPRTLSRGRMYSSASTKIMDAQVNQNSFKKIRLLGKGDVGKVYLVKENLSNRLYAMKILSKKEMIERNKIKRALAEQDILATSNHPFIVTLYHSFQSNDYLYLCMEYCMGGEFFRALQTRETKTISETDAKFYAAEVTAALEYLHLMGFIYRDLKPENILLHQSGHIMLSDFDLSKQSESTKNPEIFFSKTSHGLSSSNNHNGPTLDTKACIDGFRTNSFVGTEEYIAPEVIRGKGHTSAVDWWTLGIFIYEMLFGTTPFKGRDRKKTFGNVLKKEVKFLETRSISSSCKSLIKKLLIKDEAKRLGSKTGASDIKNHAFFKNTQWALLRHQKPPMIPVLSKNKRADKVERYDSEEDQITDSTTDVSENKDILNDPFANFSSVTLHYNELDSGDDQMVYNEADNTVYTSVAYTMTNDSSPKPKHFLKR

SEQ ID NO: 52023 - protein, 647 aa, Brassica napus
MSSAPSPGTGSPPSPPSNSTTTTPPPASAPPPTTPSSPPPPSTIPTSPPPSSRSTPSAPPPSPPTPSTPGSPPPLPQPSPPAPTTPGSPPAPVTPPTRNPPPSVPGPPSNPSREGGSPRPPSSPSPPSPSSDGLSTGVVVGIAIGGVALLVIVTLICLLCKKKRRRDEEDAYYVPPPPPPGPKAGGPYGGQQQQWRQQNATPPSDHVVTSLPPPPKAPSPPRQPPPPPPPPFMSSSGGSDYSDRPVLPPPSPGLVLGFSKSTFTYEELARATNGFSEANLLGQGGFGYVHKGVLPSGKEVAVKQLKVGSGQGEREFQAEVEIISRVHHRHLVSLVGYCIAGAKRLLVYEFVPNNNLELHLHGEGRPTMEWSTRLKIALGSAKGLSYLHEDCNPKIIHRDIKASNILIDFKFEAKVADFGLAKIASDTNTHVSTRVMGTFGYLAPEYAASGKLTEKSDVFSFGVVLLELITGRRPVDANNVYVDDSLVDWARPLLNRASEQGDFEGLADAKMNNGYDREEMARMVACAAACVRHSARRRPRMSQIVRALEGNVSLSDLNEGMRPGQSNVYSSYGGSTDYDSSQYNEDMKKFRKMALGTQEYNATGEYSNPTSDYGLYPSGSSSEGQTTREMEMGKIKRTGQGYSGPSL

SEQ ID NO: 52024 - protein, 664 aa, Yersinia pestis KIM
MSSRKELANAIRALSMDAVQKAKSGHPGAPMGMADIAEVLWRDYLNHNPTNPHWADRDRFVLSNGHGSMLIYSLLHLTGYDLPMEELKNFRQLHSKTPGHPEYGYTAGVETTTGPLGQGIANAVGFAIAERTLGAQFNRPGHDIVDHHTYAFMGDGCMMEGISHEVCSLAGTMKLGKLTAFYDDNGISIDGHVEGWFTDDTAARFEAYGWHVVRGVDGHNADSIKAAIEEAHKVTDKPSLLMCKTIIGFGSPNKAGTHDSHGAPLGEAEVAATREALGWKYPAFEIPQDIYAAWDAKEAGKAKEAAWNEKFAAYAKAYPELAAEFKRRVSGELPANWAVESKKFIEQLQANPANIASRKASQNALEAFGKVLPEFLGGSADLAPSNLTIWSGSKSLSDDLAGNYIHYGVREFGMSAIMNGIALHGGFIPYGATFLMFVEYARNAVRMAALMKIRSVFVYTHDSIGLGEDGPTHQPVEQMASLRVTPNMSTWRPCDQVESAVAWQYALERKDGPSALIFSRQNLAQQPRTAEQLANIAKGGYVLKDCAGQPELILIATGSEVELAVAAADQLTATGRKVRVVSMPSTDAFDKQDAAYRESVLPSAVSARVAVEAGIADYWYKYVGLNGAVVGMTTFGESAPAELLFKEFGFTVENVVAKAQALLK

SEQ ID NO: 52025 - protein, 217 aa, Phalaenopsis hybrid cultivar
MGRGKIEIKRIENSTNRQVTFSKRRNGIMKKAKEISVLCDAQVSLVIFSSLGKMFEYCSPSTTLSKMLEKYQQNSGKKLWDAKHENLSAEIDRIKKENDNMQIELRFSWVLSRHLKGEDLNSLNPKELIPIEEALQNGLTSVRDKQMDYLKMLKKNERMLEDENKRLTYLLHQQQMAMEGSMRELDIGYHHKDREYAAQMPMTFRVQPIQPNLQGNK

SEQ ID NO: 52026 - protein, 330 aa, Antirrhinum majus
MSLSCSDCFSDLLCGEDSNIIFSGGGDDLPEYTSDVESIPTDVDESIAGLLEDERDLAGVNSSSSNQSVDSSTRTESTAWILKVQRYYGFQPLTAYLAVSYFDRFLNAHHLPKLNGWPMQLLSVACLSLAAKMEESLVPSLLDLQVEGANFIFEPRNIQRMELLVLRVLDWRLRSISPFCYLSFFALKIDPTGTYTGFLTSRAKEIILSTVQETSLIEYRPSCIAAATMLSSANDLPKFSFITAQHAEAWCDGLHKDNIASCIKLIQGVESNNRPKKQPKVLPQLRVMTRASLASSESSSSTSSSPSYKRRKLNNSSRADDDKESSDYGV

SEQ ID NO: 52027 - protein, 422 aa, Streptomyces coelicolor A3(2)
MTSQPTLTKPEEGPAGPSGPDTGLQAGLKNRHLSMIAIGGVIGAGLFVGSSSGIATAGPGILLSYALVGTLVVLVMRMLGEMSAANPTSGSFSAHADRALGPWAGFSIGWLYWFFWVVVLAVEATAGAKILEGWIPAVPQWGWALIVMVVLTATNLASVGSYGEFEFWFAGIKVVAIAAFIVVGGLAVFGVLPGVDSDRAGLGNLTEHGGFLPHGAGAVLTGVLLVVFSFMGSEIPTLAAGESEDPQRAVTKATNSIIWRIAVFYLGSIFVVVALLPWDSQSIVDQGSYVAALDSLGIPNAGEIMNFIVLTSVLSCLNSGLYTASRMAFSLGRRGDAPKAFARTTRRGVPQAAILSSVVFGFVAVFFNYKFPDTVFLFLLNSSGAVASSSGWPSASRSCGCGRSSRPRRRRSWSCGCGCTRI

SEQ ID NO: 52028 - protein, 659 aa, Yersinia pestis KIM
MSDDNLISRPLTAGAHVSLRSMQEVAMNDRNASKMLSTYNVAYWGGNYYDVNELGHISVCPDPDIREARVDLAQLVKKMQLEQGQRLPALFCFPQILQHRLRSINAAFKRARESFGYEGGYFLVYPIKVNQHRRVIESLVNSGEPLGLEAGSKAEMMAVLAHAGMTRSVIVCNGYKDREYIRLALIGEKLGHKVYLVIEKMSEIKMVLEEAERLNVVPRLGVRARLASQGSGKWQASGGEKSKFGLSATQVLQLVDMLREANSLESLQLLHFHLGSQLSNIRDISTGVRESARFYVELHKLGVNIQCFDVGGGLGVDYEGTRSQSDCSVNYGLNEYANNVIWGIGDACNEHGLPHPTVITESGRAVTAHHTVLVSNVIGVERNEFCEPQPPEAGAPRALESLWDTWQEMQEPENRRSLREWLHDSQMDLHDVHTQYAHGMLDLTHRAWAEQLYLSICNEIQKQLDPSNRAHRPIIDELQERMADKLYVNFSLFQSMPDAWGIDQLFPVLPLEGLDKPPERRAVLLDITCDSDGTIDHYIDGDGVATTMPMPPYDPENPPLLGFFMVGAYQEILGNMHNLFGDTAAVDVYVFPDGTVEVEQTDEGDTVADMLEYVQLNPEKLLEHFRGQVKETDLDTELQAQFLEEFEAGLYGYTYLEDE

SEQ ID NO: 52029 - protein, 343 aa, Antirrhinum majus
MYQQNSPSLCFDALYCEEEQNWDNGEIINDCFIEEQEPFSDLLKHDLLCGVDDDDDDKEELSSLLCKEQEYELYRVLEDNPSLAKARDEAVEWMFKVIGYYSFSALTAVLAVNYLDRFLCTFQFQQDKPWMYQLAAVACLSLAAKVEETQVPLLLDLQVEESKYVFESKTIQRMELLVLSTLKWKMNPVTPISFLEYIARRLALKSHLCKEFLNRCECLLLSLITDCRFMCHLPSALATATMLYVISSLEPCIGVEYQDQLINILGINKDKVEECCKLIQEVATSVHFQSGNKRKFGSLPYSPKGVVDISFSCDDSWPLDSTASVSSSPEHLSKKIKTQNPDH

SEQ ID NO: 52030 - protein, 282 aa, Malus x domestica
MTKIFLVLVLLVFNVLVATSAGNFNQDFDITWGDGRAKILDNGQSLTLSLDKTSGSGFQSKNQYLFGKIDMQIKLVPGNSAGTVTAYYLSSLGSTHDEIDFEFLGNLSGDPYILHTNIFTQGKGNREQQFYLWFDPTKDFHTYSILWNPQTIIFSVDGTPIREFKNLESKGVSFPKDQGMWIYSSLWNADDWATRGGLVKTDWSKAPFTASYRNFNAQACTWSSGTSRCPSKSPNESSWLTQSLDSTGQERIKWVQKNYMIYNYCRDTKRFPQGFPPECSAA

SEQ ID NO: 52031 - protein, 361 aa, Antirrhinum majus
MLFSHSQQTHLQNPIFDALLCNEEHFDEDLDLGSGLKDPGFINQIHHNQKKEEPFTTFLFEHDLLWEDDELVNLLSKEKEQEQQAHLGYDDVMDSDGFLKRVRNEGIKWMLKVIGHYGFNAMTAVLAVNYYDRFITNVGFQKDKPWMSQLAAVACLSVKVEETQVPLLLDFQVEESKYVFEAKTIQRMELLVLTTLKWKMNPVTPISFFDHIVRRFELMNNVQCEFMKRCESVILSIITDYRFVRYLPSVVAAATMIYVIKELYPCDALEYQNEFVTVLRTSKEKTDDCHMLITEVINNQSYILCHKRKYGSIPSSPNGVIDAYFSSDGSNDSWSAVSSVSSSPEPVFKRIRAIGGANPPH

SEQ ID NO: 52032 - protein, 152 aa, Arabidopsis thaliana
MGALDSLSEYISDYFRVTRKRRKRKVMQTVNIKVKMDCDGCERRVKNAVSSMKGVKSVEVNRKIHKVTVSGYVEPKKVLKRIERTGKKAEIWPYVPYNMVAYPYAVGTYDKKAPAGYVRKSEQSQLQLLPGAPENHYISLFSDENPNACTVM

SEQ ID NO: 52033 - protein, 514 aa, Solanum tuberosum
MDGTAVQGTSSVDSFLRNYKLGKTLGIGSFGKVKIAEHTLIGHKVAVKILNRRKIRNMDMEEKVSREIKILRLFMHGHISRLYEVIETPSDIYVVMEYVKSGELFDYIVEKGRLQEDEARNFFQQIISGVEYCHINMVVHRDLKPENLLLDSKWNVKIADFGLSNIMRDGHFLKTSCGSPNYAAPEVISGKLYAGPEVDVWSCGVILYALLCGTLPFDDENIPNLFKKIKGGYITLPSHLSAGARDLIPRMLIVDPMKRMTIPEIRLHPWFQAHLPRYLAVPPPDTMQQAKKIDEEILQEVVKMGFDRNNLTESLRNRVQNEGTVPYYLLLDNRHRVSTGYLGAEFQESMEYGYNRINSNETAASPVGQRFPGIMDYQQAGARQFPIERKWALGLQSRAHPREIMTEVLKALQELNVCWKKIGQYNMKCRWVPSVPGHHEGMGVNSMHGNQFFGDDSSIIENDGDTKLTNVVKFEVQLYKTREEKYLLDLQRIQGPQFLFLDLCAAFLAQLRVL

SEQ ID NO: 52034 - protein, 399 aa, Pseudomonas syringae pv. phaseolicola 1448A
MLAHVESYAGDPILSLMETFGKDSRADKVNLSIGLYYDAQGRIPQLACVATAQQQLAQGEQEASVYLPMEGLAAYRHAVQTLLFGADHPLVQAGRVATIQTVGGSGALKVGADFLKYAFPDSQVWVSDPTWENHNALFGGAGFKVNSYPYFDAQTGGVRFEAMLDTVQRLPAQSILLLHPCCHNPTGADLTVEQWDRLIEVIKDRQLIAFLDIAYQGFGKGIDEDAYAIRAMANAGVTTLVSNSFSKIFSLYGERVGGLSVVCEDTASAANVFGQLKATVRRNYSSPPAHGAFLVSKVLNTPHLREQWLSEVEAMRVRIIDMRTRLVEVLAQKVSGRDFSFILRQSGMFSYTGLTPQQVDELKDVHGIYMLRSGRVCMAGLNEGNIDKVCNAIASLFTH

SEQ ID NO: 52035 - protein, 406 aa, Escherichia coli
MKRVVITGLGIVSSIGNNQQEVLASLREGRSGITFSQELKDSGMRSHVWGNVKLDTTGLIDRKVVRFMSDASIYAFLSMEQAIADAGLSPEAYQNNPRVGLIAGSGGGSPRFQVFGADAMRGPRGLKAVGPYVVTKAMASGVSACLATPFKIHGVNYSISSASATSAHCIGNAVEQIQLGKQDIVFAGGGEELCWEMACEFDAMGALSTKYNDTPEKASRTYDAHRDGFVIAGGGGMVVVEELEHALARGAHIYAEIVGYGATSDGADMVAPSGEGAVRCMKMAMHGVDTPIDYLNSHGTSTPVGDVKELAAIREVFGDKSPAISATKAMTGHSLGAAGVQEAIYSLLMLEHGFIAPSINIEELDEQAAGLNIVTETTDRELTTVMSNSFGFGGTNATLVMRKLKD

SEQ ID NO: 52036 - protein, 149 aa, Methanococcus vannielii
MDVSTQRRIAAAVLDCGIDRVWVDPENLEKVKMAITKDDIRLLINDGIIVKKQEKGISSARKKEVQEQKRKGKRKGPGSRRGAKGARTPKKEKWMNTIRPLRTLLKELRENEKIERSSYRKLYRMAKGGAFRSRNHMKLYMKEHGILAE

SEQ ID NO: 52037 - protein, 466 aa, Corynebacterium efficiens YS-314
MKFHCKFTCPRCRDGNVEFMTVDEQVSNYYDMLLKRNAGEPEFHQAVAEVLESLKIVLEKDPHYADYGLIQRLCEPERQLIFRVPWVDDNGQVHVNRGFRVQFNSALGPYKGGLRFHPSVNLGIVKFLGFEQIFKNSLTGLPIGGGKGGSDFDPKGKSELEIMRFCQSFMTELHRHIGEYRDVPAGDIGVGGREIGYLFGHYRRLANQHESGVLTGKGLTWGGSLVRTEATGFGTVYFVQEMIKAEGETLEGKKVIVSGSGNVATYAIQKVQELGAVVVGFSDSSGWVSTPNGVDVAKLREIKEVRRARVSSYADEVEGAEYHTDGSIWDLTADIALPCATQNELDGDNARTLADNGCRFVAEGANMPSTPEAIDVFRERGVLFGPGKAANAGGVATSALEMQQNASRDSWSFEYTDERLHRIMKNIFKSCADTAKEYGHEKNYVVGANIAGFKKVADAMLAQGVI

SEQ ID NO: 52038 - protein, 205 aa, Aspergillus parasiticus
MSSRKKVLLKVIILGDSGVGKTSLMNQYVNKKFSASYKATIGADFLTKEVLVDDRLVTMQIWDTAGQERFQSLGVAFYRGADCCVLVYDVNNSKSFEALDSWRDEFLIQASPRDPENFPFVVIGNKIDVEESKRMISSKRAMTFCQSKGNIPYFETSAKEAVNVEQAFEVIARSALAQEEAEEFSGEFSDPINIHLDSERDGCAC

SEQ ID NO: 52039 - protein, 206 aa, Glycine max
MSLRRRTLLKVIVLGDSGVGKTSLMNQYVHKKFSQQYKATIGADFVTKELQIDDRLVTLQIWDTAGQERFQSLGVAFYRGADCCVLVYDVNVMKSFDTLENWHEEFLKQANPPDPRAFPFILLGNKIDIDGGNSRVVSEKKAKDWCAAKGNIPYFETSAKEAYNVDAAFLCIAKAALANEHEQDIYFQGIPEAAVPENEQRSGCAC

SEQ ID NO: 52040 - protein, 425 aa, Corynebacterium efficiens YS-314
MSHISDLLRNHGVDLSWQEGLYQDLHEHPELSGFESETSRTILSQLERFDCEVISPVGGYGVIAIFRNGDHEKYPVALMRADFDGLPVKETTGVPWASTRMRPLDGTNVPVMHACGHDMHTTALLGACALLDERRDAWQGTFIALFQPSEENARGANAMVSDGLAQKIPRPDVCFSQHVVPGPAGAVMSRPGAALAACDSINIRIRGRSAHGSMPHNSIDPTYVAAMIVVRLQGIVGREVSPEEFAVISVGTLSSGNSNNTIPSEARLVLNCRFYNDKVKKRVYRAIERVVKGECMASGIEHEPVIEYFAHGELTDNDVEVFAKVRPVFDEVFGPQSVTSDRWTASEDFPNIPLALNSPYLYWTIGATPAGDWARAVAADRVAQDIPANHMGDFLPDFVPTVASATTAAAAAVLTYLGVPSHQKS

SEQ ID NO: 52041 - protein, 90 aa, Borrelia garinii PBi
MKNIKPLADRVLIKIKEAESKTISGLYIPENAKEKTNIGTVIAIGSNKEEITVKVGDTVLYEKYAGAAVKIENKEHLILKAKEIVAIIEE

SEQ ID NO: 52042 - protein, 173 aa, Methanosarcina barkeri str. fusaro
MVRKPGSMYRNVRQRSFTRRKYMGGVPGSQVIHYDMGDKANTSFPIKLSLLVEEKCQIRHTALEAARITANRHLIEDTGKMGYYMKLRVYPHEVLRENKQATGAGADRVSSGMRRAFGKNVGTAARVNPFQKIFTVAVEKQNFVAAKKALWHAGQKLPTPCRIVIDEGAELVQ

SEQ ID NO: 52043 - protein, 665 aa, Bacillus anthracis str. Sterne
MNKKMEQLKHPVTDNQRKHALTTNQGVKIAEDEFSLKMGLRGPTLMEDFHFREKMTHFDHERIPERIVHARGVGAHGYFQLYESLEAYTKADFLTNPSKKTPVFVRFSTVQGSKGSNDAVRDVRGFATKFYTDEGNYDLVGNNMPVFFIQDAIKFPDFVHAVKPEPHNDIPQGASAHDTFWDFVAHNPESTHMVMWQMSDRAIPRSLRMMEGFGVHTFRLINKEGKAHFVKFHWKPALGVHSLVWDEAQKIAGKNPDFHRQDLYEAIEKGDYPEWELGLQLIPEEDEHTFDFDILDPTKLWPEEEVPVKLVGKMTLNKNVDNFFAETEQVAFHPGHVVPGIDFSNDPLLQGRLFSYTDTQLSRLGGPNFHQTPINQPVCPFHNNQRDGMHQMQIHRGQTSYHPNGLNDNQPATVQAEQGGYEHYQEKIDGHKIRGRSKSFLNFYSQAKLFYNSMSPIEKQHIKEAFCFEVGKCKSDMVKANVIALLNHVDRQLAQEVANIIGAPLPKENHEVNSDAKSPALSMSNTIFKADSKNVAIVLNGDPSVSLLSEWIQAFAQHRINYSIVDNKIYQFNNSIKVTDTYTTTDSSLFDAVLVFSSESAIHPPVLEFAETTFKHFKPIAHVLSNPHALDNSKIKLDGAGIYNLANTSIESFIEGIAQGRFWNR

SEQ ID NO: 52044 - protein, 243 aa, Oryza sativa
MGRSPCCEKAHTNKGAWTKEEDQRLIAYIKAHGEGCWRSLPKAAGLLRCGKSCRLRWMNYLRPDLKRGNFTDDDDELIIKLHALLGNKWSLIAGQLPGRTDNEIKNYWNTHIKRKLLSRGIDPLTHRPVNAAAATISFHPQPPPPTKEEQLILSKPPKCPDLNLDLCISPPSCQEEDDDYEAKPAMIVRAPELQRRRGGLCFGCSLGLQKECKCSGGGAGAGAGNNFLGLRAGMLDFRSLPMK

SEQ ID NO: 52045 - protein, 476 aa, Brucella suis 1330
MYPNLTLIVGGEERNKGSAGTLCLTDPADGRELTIAPRAGRAEALQAAAAEKGFAEWSALSALERSKIMRRAADIMRERADAAARIMSMEQGKPLAEARGEWLGSADLLDWFAEEGRRVYGRIVPSRAPNIQIQVLKHPIGPVAAFTPWNFPAWNTMQKVAPALGAGCSVVIKPASDTPGTAWLIGKCLLEAGLPPKAVSVIWGTTSELSDALIKAPEFRKVSLTGSTRVGRIVAAQAGEYLKKVTMELGGHGPVIVAADADLDHLIPLAVQWKFRNCGQVCVSPTRFIVEASIHDEFIRRFSEKARELKVGKGVEEGTQMGPLTSQNQLETVLSMVEDALTKGAKIETGGNRIGDTGNFYEPTILSGMTAEMLAMNEEPFGPLALVMRVHSLDEAIAESNRLPVGLGAYLFTSSMTTAHRVQNHLQAGMLGVNHFALALPETPFGGVRDSGFGSEGGLEGIEAYLTTMTVTTMMV

SEQ ID NO: 52046 - protein, 204 aa, Glycine max
  misc_feature (168)..(168): Xaa can be any naturally occurring amino acid
  misc_feature (181)..(181): Xaa can be any naturally occurring amino acid
  unsure (1)..(204): unsure at all Xaa locations
MQIFVKTLTGKTITLEVESSDTIDNVKAKIQDKEGIPPDQQRLIFAGKQLEDGRTLADYNIQKESTLHLVLRLRGGMQIFVKTLTGKTITLEVESSDTIDNVKAKIQDKEGIPPDQQRLIFAGKQLEDGRTLTDYNIQNESTLHLMLRLHGGMHIFIKTLTSKTITLXVESFDNIDQLKGXIQDKGGIPPEPQKLIFARKQLED

SEQ ID NO: 52047 - protein, 196 aa, Glycine max
MSTARFIKCVTVGDGAVGKTCMLISYTSNTFPTDYVPTVFDNFSANVVIDGSTVNLGLWDTAGQEDYNRLRPLSYRGADVFLLAFSLLSRASYENISKKWIPELRHYAPIVPIVLVGTKLDLREDRQYLIDHPAATPITTAQGEELKKEIGAAVYIECSSKTQQNVKAVFDAAIKVVLQPSKPKKKRKKNRTCVFL

SEQ ID NO: 52048 - protein, 173 aa, Anabaena variabilis ATCC 29413
MMRTNERLKPGSDSQENLRGVKDMTIIRWNPWQDLNTLQRQLNHLFEEDMLPSTVLERTLTRVPAAEIHETAEAIHLKLELPGIDAKDVDLQVTDKAVYISGERKSETKTEDKGVVKSEFQYGKFQRVIPLPTRIQNTNVKAEYKDGILNLTLPKAEAEKNKVVKVNIESAVG

SEQ ID NO: 52049 - protein, 438 aa, Methanococcus vannielii
MKIKPILELIPEVKRPLKGVSFKEKIQWTGLVLILYFILGTIDIYMGGAEMPAMFAFWQTVTASKMGTLITLGIGPIVTAGIIMQLLVGSELISLDLSKPMNRALFQGLQKLFGIFLCFLEAVMFVGAGAFGVVNSTLALILVLQLALGAILVIYLDEIVSRYGIGSGIGLFIAAGVAQTIFVGAFGAEGYLWKFFSAMSVGSLGIAFEYILPILSTLFVFLVVVYVESIRVEIPLAHGRVKGAVGKYPIKFIYVSNLPVILAAALFANIQLWGMFLDRMGYPILGQYSNGTAVSGIAYYFSTPYGISNIISDPLHAIFYTLMMVIFCILFGLFWVETSGLDAKSMAKKLGNLDMAIKGFRKSQKSIEQRLKRYIKPITVMGSAFVGFLAAAADFTGALGGGTGVLLTVSIVYRLYEQLVQEQLSELHPAVAKFVGKR

SEQ ID NO: 52050 - protein, 487 aa, Corynebacterium efficiens YS-314
MSPPHPQRVRLVDVERRTKIVCTLGPAVASADGILRLVQDGMDVARLNFSHGDHPDHEQNYKWVREATDKTGRAVGILADLQGPKIRLGRFKEGSTVWETGETVRITVDDVEGTHDRVSTTYKNLAKDARPGDRLLVDDGKVGLVCVSVEGNDVICEVTEGGPVSNNKGVSLPGMDISVPALSEKDIKDLRFALKLGVDFIALSFVRSPADVELVHAIMDEEGRRVPVIAKLEKPEAVAALESIVLAFDAIMVARGDLGVEVPLEEVPLVQKRAIQIARENAKPVIVATQMLDSMIENSRPTRAEASDVANAVLDGADAVMLSGETSVGKDPHNVVRTMSRIVRFAETDGRVPDLTHIPRTKRGVISYSARDIAERLNARALVAFTTSGDTAKRLARLHSHLPLLVFTPDPSVRSQLALTWGAQTFLCPKVDDTDGMMREVDRALLAMDEYQKDDMMVVVAGSPPGVTGNTNMIHVHLLGEDTRIPK

SEQ ID NO: 52051 - protein, 362 aa, Kluyveromyces lactis NRRL Y-1140
MELKQEKTFYQTHGLIQTLVQLFWKLDIIGLLLLTASMGCILVPLTIAGGIENEWKTGKIIGPLVLGVFLVPVTIYWESQWAKAPFAPFKLLKDRGIWAPMWMMFLVCFVYVMAAGYLYTILLVGMNQTDLSATRIMNLYSFVAGIYSPVFGFMVARTRRLKLYMIFGACLYFVVMGLFFRYRGGIGSAAGVIGAMVVWGVASCMYDYPVTTAQSVTSHEHMATVTALLMTIFSIGGAVGSSVSGAIWTNLLYPRLLKNLGGDADLAAVAYDSPLDFILDYEWGTPIRAAMVEAYEHVQRYEVLVGLVFCVPMLILTFCIRDPKLVNEFGQQLNEGECVETEGEDPISEWISSRIKKLRRRH

SEQ ID NO: 52052 - protein, 251 aa, Kluyveromyces lactis NRRL Y-1140
MSVAEESSITVKDENINKGFNNDEKEVAVDESLTPEKLNDFGNVDKLLATKSLVIRKAEIMARQYDTWFYQTIFLLSAFICSYGYSLDSSIRDIYMTYAANDYDTHSLLTTIGIVNMMISAVAQLFFAGLSDVFGRLSLMIVAIVFYVVGTVIQSQAYDIQKYCAGSVFYNVGLVGVMLQVTLFLSDNSSLRWRVLYNFVPAWPAIINMWVSGNIVEVANPLENWSWNIAMWAFIFPLSCIPLIVCVLHMR

SEQ ID NO: 52053 - protein, 1960 aa, Arabidopsis thaliana
  misc_feature (1871)..(1871): Xaa can be any naturally occurring amino acid
  unsure (1)..(1960): unsure at all Xaa locations
MESSEEDDEYPFIESITPQSKIDSVHQSLTEKGIRKLCCELMDLKDAVENMCGDMRTKYLAFLRISEEAVEMEHELVELRKHISSQGILVQDLMAGVCREMDDWNRLPGDVHDAEVEEDPLPNEVTDPKSEFLEKIDLLLAEHKVDEALEAMDAEERSSPDLKGSVEMSSYKSAFMERKAVLEDQLLRIAKQPSICVAELKHALIGLIRLGKGPSAHQLLLKFYATSLRRRIEAFLPSCLTCPNTFPATLSKLVFSNISVATKESAAMFGDDDNPAYSNKVVQWAEREVEYLVRLVKENASPSETASALRAASICLQDCLNYCKVLEPQGLFLSKLFLVLFRPYVEEVLELNFRRARRVIFDLNETDEGLESPSDFVTILSEFAIASDTMMTDCSIRFMQIVQDILEQLTHLVVLHFGESVLTRILQLYDKYIDFLIKALPGHSDEDGLPELQDNTVLARAETDSEQLALLGAAFTILDELLPRSLVKVWKLQIENGGGEGENSAALNSSAAPELKEWKRHMVQAFDKLRNYFCLQFVLSFIYSREGLTRLDALIYLTETPDDLHLPSLPFQALFSKLQQLAIIAGDVLLGKEKLQKILLARLTETVIIWLSNEQEFWSAFEDESNPLQPSGLQQLILDMNFTVEIARFAGYPFKVVQNHASVVINRAINIFSERGINPQSSLPKTEWFTEAAKSAINRLLMGSEDASEPEEYECEEEEEDDHHIVLPEMDDDSDSEDTSSLSTVDSFESTIAPTVTGTGSSSVFVESRQNMSFQVRRDRSDDRSHRFNHQQTWIPRNSSTSSVVVNEPLLPPNTDRNSETLDAGSASRPVYLQRQHNASGPPSYNHHQRSSNIGPPPPNQHRRYNAPDNQHQRSDNIGPPQPNQHRRYNAPDNQHQRSDNSGPPQPYRHRRNNAPENQHQRSDNIGPPPPNRQRRNNASGTLPDNRQRVASRTRPVNQGKRVAKEENVVLTDPNLPQLVQELQEKLVKSSIECMICYDKVGRSANIWSCSSCYSIFHINCIKRWARAPTSVDLLAEKNQGDNWRCPGCQSVQLTSSKEISYRCFCGKRRDPPSDPYLTPHSCGEPCGKPLEKEFAPAETTEEDLCPHVCVLQCHPGPCPPCKAFAPPRSCPCGKKMVTTRCSERRSDLVCGQRCDKLLSCGRHQCERTCHVGPCDPCQVLVNATCFCKKKVETVICGDMNVKGELKAEDGVYSCSFNCGKPLGCGNHFCSEVCHPGPCGDCDLLPSRVKTCYCGNTRLEEQIRQSCLDPIPSCSNVCRKLLPCRLHTCNEMCHAGDCPPCLVQVNQKCRCGSTSRAVECYITTSSEAEKFVCAKPCGRKKNCGRHRCSERCCPLLNGKKNDLSGDWDPHVCQIPCQKKLRCGQHSCESLCHSGHCPPCLEMIFTDLTCACGRTSIPPPLSCGTPVPSCQLPCPIPQPCGHSDTHGCHFGDCPPCSTPVEKKCVGGHVVLRNIPCGLKDIRCTKICGKTRRCGMHACARTCHPEPCDSFNESEAGMRVTCRQKCGAPRTDCRHTCAALCHPSAPCPDLRCEFSVTITCSCGRITATVPCDAGGRSANGSNVYCAAYDEASVLQKLPAPLQPVESSGNRIPLGQRKLSCDDECANLERKGVLQDAFHITPPNLEALHFSENSAMTEIISDLYRRDPKWVLAVEERCKFLVLGKARGSTSALKVHIFCPMQKDKRDTVRLIAERWKLGVSNAGWEPKRFSVVHVTADPKPPTRIIGPGGGAISIGGPHPPFYDSLVDMDPGLVVSFLDLPREANISALVLRFGGECELVWLNDKNALAVFHDHARAATAMRRLEHGSVYHGAVVVQSGGQSPSLNNVWGKLPGSSAWDVDKGNPWRRAVIQEXSDDSWGAEDSPIGGSSTDAQASALRSAKSNSPIVTSVNRWSVLEPKKASTSTLEPIAQIEESSSSKTTGKQPVEGSGEEVVDDWEKVCE

SEQ ID NO: 52054 - protein, 449 aa, Oceanobacillus iheyensis HTE831
MEDLFELDKKHFIHPTSSIIQQQTDGAKSIMAKGDGIYVTDTNNKEYIDAVSSLWNVNIGHGRTELAEVASEQMKKLAFSSAFSTFSHEPAIRLAKKISELTPQGLNAVFFTSGGSESNDSAVKLSRHYWKIQNKASKRKIISLKRGYHGVAAASTSITGIPEFWDMAGHLMNDFLHAETPYRSTTEKAIESLQSMIEQETADTIAAIFVEPVQGAGGVLIPPADYLEAVREICDFYNILFIADEVITGFGRTGTMFGMENWNVVPDAMTFAKGVTSGYIPMGGVVVSDHIHTVLKEKSKGTLFHGFTYSGHPTAAAVALKNIEIIEKESLVTNAKERGLELQNGFQKIKKESSIVGEVRAIGLIGAIELMQDSATGQPFTPDVGVTPAVINALHERGVISRGVTYDGSNILCFAPPLIITKQEVNELISRISDAILFVQHQLGVSQNY

SEQ ID NO: 52055 - protein, 282 aa, Bradyrhizobium japonicum USDA 110
MIQISPHAEAALTCTLDERSLYLRRLVLGSVRSAGRGHVGPALSLIEMVRVLYDDVLRIDPKNPRDPNRDRAILSKGHGCLALYALLADRGFLPLSELDGFCGPDSILGGHPEYGMVPGVEASTGALGHGLSIGVGLALAARMRERTYRTFVLLGDGEINEGSVWEAAMGAAKHGLDNLVALIDYNKLQSYGPTDYVLPLEPLADKWRSFGFAVQELNGHDVGALRTVLKQVPPVAGKPTAIICHTVKGKGLPAAESNADWHHKNKLTDSELDAIRVAVGDF

SEQ ID NO: 52056 - protein, 484 aa, Oceanobacillus iheyensis HTE831
MAELKAITTYQMYINGEFVNASNNETLEVTNPATEEIVSTVPKASLEDTRRAIDGSAKAQKDWANLPSSKRASYLFAISKEIRSNIDEYAKIISEEMGKPLDQAVVEVSVTADYFEYIAGWARKYEGEIVPSDREKENILVFKQPIGVVAGILPWNFPFFLIARKAAPAILTGNTIVLKPSSVSPNNALAFAKILDKVGLPKGVINIVTGAGSIVGEELSKNEKIGMISLTGSTEAGSRVMEKASKNITKVSLELGGKAPSIVMEDADIDLAVKSVLDSRIINTGQVCNCTERVYVHEDVADEFIEKITKAMSNVSYGNPLGNEQIDMGPLSNEAGLKNVEDMVKRAVENGATVLTGGNRVNTEAGYYYEPTVLSNVDNSFEIMKEEVFGPVLPIATFTSLDEAIELANDCQYGLTSAIFTNNVNYMMRASNELEFGETYVNRESFEAIQGFHAGWKKSGIGGADGKHGLGEFLQTHVVYIQYK

SEQ ID NO: 52057 - protein, 399 aa, Rubrivivax gelatinosus PM1
MAKQVQDAYIVAATRTPIGKSGRGYFRNTRPDDLLVAAVQSALRQVPTLDPKAIEDAIVGCSFPEGEQGMNIARAAMLLAGLPQSVGGVTVNRFCASGLTALQMAADRIRIGEADVMIAGGAESMSLVPMGGNKPSFNPAVFEKDENVGIAYGMGLTAEKVAAQWKVSREAQDAFALQSHQRALAAQAAGEFTDEMTPIDVVDRFPNLATGEVGSKTRTVTLDEGPRPDTSLEGLARLRPVFAAKGSVTAGNSSQTSDGAGALILASEKAVRQFDLKPLARFVSYAIRGVPPEIMGIGPIEAIPLALKHAGLKLDDLGWIELNEAFAAQALAVIGSVGLDPAKVNPMGGAIALGHPLGATGAIRSATVVHALQRHNLKYGMVTMCVGMGQGAAGILERV

SEQ ID NO: 52058 - protein, 637 aa, Cucumis melo
MMESCDCIDAQWPPDELLVKYQYISDVLIALAYFSIPLELIYFVQKSAFFPYRWVLMQFGAFIVLCGATHFINLWTFSMHSKAVAVVMTVAKVACAIVSCATALMLVHIIPDLLSVKTRELILKNKAEQLDREMGLILTQEETGRHVRMLTHEIRSTLDRDTILKTTLVELGKTLGLEECALWMPSRNGLSLQLSHALNYQIPVGTNIPINLPVVNDVFNSNRAICVPYTCQLARVRTPVGGRYLPPEVVAVRVPLLNLSNFQMNNWPDGSSRSYAIMVLILPTDSARKWRDHELELVDVVADQVAVALSHAAILEESMRARDQLVDQNVALDLARREAETAIHARNDFLAVMNHEMRTPMHAIIALSSLLLETELTPEQRVMIETILKSSNLLATLINDVLDLSRLEDGSLVLDMGSFNLHAIFKEALDLIKPIASVKKLSMALILASDLPICAVGDEKRLMQIILNIVGNGVKFTKEGHVSIIASIAKLDSLRDWRPTEFYPMQSDGQFYLRVQVKDSGCGIPPQDIPHLFTRFTQLQTRSNKTNSGVGLGLALCKRFINLMGGHIWIESEGPDKGTTAMFIVKLGICNANPNDLSVKQVAPIVNHRSADLHGQRPIFRETGQVAFSNSRYQRSL

SEQ ID NO: 52059 - protein, 456 aa, Oryza sativa
MARRAREEEADQVERKLVLGRYELGRLLGQGTFAKVYYGRDLRSGESVAIKVIDKARLRRTEGMVEQLRREISIMRMVRHPNVVGIREVLASRARVFVVMEYARGGELFAKVARGRLTEEHARRYFQQLVAAVGFCHGRGVAHRDLKPENLLLDEEGRLKVTDFGLAALPEQLRQDGLLHTQCGTPAYVAPEVLRKRGYDGARADLWSCGVVLYVLLCGFLPFQHENYAKMYQKIFKAEYQVPPWVSGDARRLIVRLLVVDPAKRISIPEIMRTPWFKKGFVPPVPTSPVSPKKWEEDDVLLDGGDSGAMSPRTCNAFQLISSMSSGFDLSGMFESEQKAATVFTSRAPAATVIQKLEAVGRSLGYSATRGKGWKLRLEATADGANGRLAVTVEALEVAADVAVVEFAHDAGDELEFNKFCAVDVRPGLADIVWAWQGDRPAAPDVAAATVECSPA

SEQ ID NO: 52060 - protein, 418 aa, Arabidopsis thaliana
MVEKMVDPSVVGTGVSGTVGGSSISGLVPKDESVKVLAENFQTSGAYIAREEALKREEQAGRLKFVCYSNDSIDERMMCLIGLKNIFAGQLPKMPKEYIVRLLMDRKHKSVMVLRGNLVVGGITYRPYHSQKFGEIAFCAITADEQVKGYGTRLMNHLKQHARDVDGLTHFLTYADNNAVGYFVKQGFTKEIYLEKDVWHGFIKDYDGALPMECKIDPKLPYTDLSSMIRQQRKAIDERIRELSNCQNVYPKIEFLKNEAGIPRKIIKVEEIRGLREAGWTPDQWGHTRFKLFNGSADMVTNQKQLNALMRALLKTMQDRADAWPFKEPVDSRDVPDYYDIIKDPIDLKVIAKRVESEQYYVTLDMFVADARRMFNNCRTYNSPDTIYYKCATGWKHTSIAKYKQVSNLVLNLNRRRW

SEQ ID NO: 52061 - protein, 658 aa, Streptococcus thermophilus CNRZ1066
MSNLSVNAIRFLGVDAINQSNSGHPGVVMGAAPMGYTLFTRQMHVNPEVPNWINRDRFVLSAGHGSMLLYALLHLSGFKDLSIEELKQFRQWGSKTPGHPEFGHTVGVDATSGPLGQGIAMAVGMAQAERFLASRYNKEGFPIFDHYTYVIAGDGCFMEGVSAEASSYAGLQKLDKLIVLYDSNDINLDGETKDSFTEDVRARYEAYGWNTEFVQDGTDIEAINAAIESAKASGKPSLIEVKTVIGHGAPNKQGTNGVHGAPLGPDETAAARENLGWNHAPFEIPKEVYADFKENTVDRGRQAYDTWVALVDEYKQSYPELGSELARILEGKDAVEFQSSDFPAVENGYSQATRNSSQDALNAIADKVPTFLGGSADLAHSNMTYIKSEGLQDDEHRLNRNIQFGVREFAMGAILNGMSLHGGLRVYGGTFFVFSDYVKAAVRLSALQGLPVTYVFTHDSIAVGEDGPTHEPIEHLAGLRAIPNLNVYRPADARETQAAWYQAITSKSTPTALVLTRQNLTVEEGTDFDKVSRGAYVVHETAADFDTILLASGSEVNLAVASAKALESEGYKVRVVSVPSTDVFDAQDQAYKEEVLPNAVRRRVAIEMAASLPWYKYVGLDGAVIGIDTFGASAPAAKIIEEYGFTVENIVETVKGMN

SEQ ID NO: 52062 - protein, 473 aa, Antirrhinum majus
MGSRNIVQQQNRAEAAVPGAMKQKNIAGEKKNRRALGDIGNLVTVRGVDGKAKAIPQVSRPVTRSFCAQLLANAQTAAADNNKINAKGAIVVDGVLPDRRVAAARVPAQKKAAVVKPRPEEIIVISPDSVAEKKEKPIEKEKAAEKSAKKKAPTLTSTLTARSKAASGVKTKTKEQIVDIDAADVNNDLAVVEYVEDMYKFYKSVENESRPHDYMGSQPEINEKMRAILIDWLVQVHHKFELSPETLYLTINIVDRYLASETTIRRELQLVGIGAMLIASKYEEIWAPEVHELVCISDNTYSDKQILVMEKKILGALEWYLTVPTPYVFLVRFIKASMTDSDVENMVYFLAELGMMNYATLIYCPSMIAAASVYAARCTLNKAPFWNETLQLHTGFSEPQLMDCAKLLVAFPKMAGDQKLKSIYRKYSNLERGAVALLSPAKSVFVFLIELLMNAIEKIQCSLFFTSEIWCRF

SEQ ID NO: 52063 - protein, 441 aa, Antirrhinum majus
MGSRHQVVQQQNRGDVVPGAIKQKSMAVEKKNRRALGDIGNVVTVRGVEGKALPQVSRPITRGFCAQLIANAEAAAAENNKNSLAVNAKGADGALPIKRAVARVPVQKKTVKSKPQEIIEISPDTEKKKAPVLEKEITGEKSLKKKAPTLTSTLTARSKAASVVRTKPKEQIVDIDAADVNNDLAVVEYVEDMYKFYKSAENDSRPHDYMDSQPEINEKMRAILIDWLVQVHYKFELSPETLYLTINIVDRYLASKTTSRRELQLLGMSSMLIASKYEEIWAPEVNDLVCISDGSYSNEQVLRMEKKILGALEWYLTVPTPYVFLVRFIKASLPDSDVEKNMVYFLAELGMMNYATIIMYCPSMIAAAAVYAARCTLNKMPIWNETLRMHTGFSEVQLMDCAKLLIDFHGGSTDQKLQGIYRKYSRLEKGAVALLPQPLLA

SEQ ID NO: 52064 - protein, 364 aa, Burkholderia sp. 383
MERSSSSSSPQREPGRGWWRWAAIGGAVAGVAVAFGYVGGWLAPARLTPHRIVDALQTAGGGIHPGFRRNHAKGVCVTGYFEGNGAASMYSVAPFFKAVRTPVVGRFALPGGNPYAPDSSVPIRSLALRLTAPDGEQWRTGMNAMPVFPVATPQAFYAQLMATRPDPKTGKPDPAKVKAFFGSHPETAAFLQWIKGAKPSASYVTESYYGLNAFYFVDAAGKRQAVRWRVVPEQSAGAGDVATAADPNVLQQDVTQRIAAGPQKWKLLVTLAEPGDPVDDATKVWPAQRTTIDAGTLVLDRVEAQDSGPCRDVNYDPTVLPQGIQVSGDPLLPARSAAYADSYLRRTSEEAGVAGVARLSGEGR

SEQ ID NO: 52065 - protein, 502 aa, Agrobacterium tumefaciens str. C58
MGNNPIPMTAAGNRANREKMRRQPIRSRATGANHKEQIFLHGDEPGWESPEDACRAFPGGTTMSDTGGYFPRWRLKTEGRIMPDERLPAGQTAVLGLQHVVAMFGSTVLAPLIMGFDPNVSILFSGISTLIFFIAVGGRVPSYLGSSFAFIGPVLVATGAAAGAASPDIALALGGIIAAGVLYALIGVIVMIVGHNWIEKLMPPVLTGAIVAAIGLVLAPIAIASASGTGPGNPDGDQLSRWIAILTVTSVGAIAVYAPGMTRRLPILLGGAIAYLAYLVLANGFGLGKPVDFAGVAAAAWFGLPAFTTPVFSAPAIALIAPVVVILVAENLGHIKAIGAMTGRNLDPYLGRAFIGDGIATIFSGAFGGTGMTTYAENMGVMAITRIFSTLVFIVAALVAIILGFSPKFGALIQTIPGPVIGGLSVVVFGLIAATAGRIWVENKVDFSEPRNLITVGIALVLGAGNFKLNVAGFTLDGIGTATIGAIAFYHLLGLGRPAQGR

SEQ ID NO: 52066 - protein, 499 aa, Glycine max
MGMLLLLSYSLLFLVLFLTLKSLFQSRKLRNLPPGPPPLPIIGNLNLLEQPIHRFFQRMSKEYGNIVSLWFGSRLAVVISSPTAYQECFTKHDVALANRLPSLSGKYIFYNNTTVGSCSHGQHWRNLRRITALDVLSTQRVHSFSGIRSDETKRLVQRLLAKNSKEGFARVEISSMFNDLTYNNIMRMISGKRFYGEESELKNVEKAREFRETVTEMLELMGVANKGDHLPFLRWFDFQNVEKRLKSISKRYDTILNEIIDENRSKKDRENSMIDHLLKLQETQPEYYTDQIIKGLALAMLFGGTDSSTGTLEWSLSNLLNHPEVLTKAKEELDTQVGQDRLLNESDLPKLPYLRKIILETLRLYPPAPILIPHVSSEDITIEGFNVPRDTIVIINGWGMQKDPHLWNDATCFKPERFDVEGEEKKLVAFGMGRRACPGEPMAMQSVSFTLGLLIQCFDWKRVSEEKLDMTENNWITLSRLIPLEAMCKARPLATKIGV

SEQ ID NO: 52067 - protein, 312 aa, Pseudomonas fluorescens Pf-5
MYLVCGEALFDFFSADEAGAPASKVAFQAIAGGSPFNVAVGLRRLGVDVALLAGVSRDYLGQRLRRVLENEGVDTRYLREFDAPTTLAMVAVGADGSPHYSFRGEGCADRQLQEEHLPQLDAQVRGLHIGSFALVVQPIADTLLALVRRERGQRLISLDPNVRLNPQPDIQLWRQRIAELAGHADLIKVSDEDLAQLYPGQAPETLIRGWLQGNARLVFLTRGSQGATVFSRGHGSWSVDAPRVEVADTVGAGDTFQAALITWLTEQGLDSPQGLEQLDREQTDALLRFAVNAAAQTCTRTGPDLPYRHQLP

SEQ ID NO: 52068 - protein, 517 aa, Funalia trogii
MARFQSLLTFITLSLVASVYAAIGPVADLTISNGAVSPDGFSRQAILVNDVFPSPLITGNKGDRFQLNVIDNMTNHTMLKSTSIHWHGFFQHGTNWADGPAFVNQCPISTGHAFLYDFQVPDQAGTFWYHSHLSTQYCDGLRGPIVVYDPQDPHKSLYDVDDDSTVITLADWYHLAAKVGSPVPTADATLINGLGRSIDTLNADLAVITVTKGKRYRFRLVSLSCDPNHVFSIDGHSLTVIEADSVNLKPQTVDSIQIFAAQRYSFVLNADQDVGNYWIRALPNSGTRNFDGGVNSAILRYDGAAPVEPTTSQTPSTNPLVESALTTLEGTAAPGSPAPGGVDLALNMAFGFAGGKFTINGASFTPPTVPVLLQILSGAQSAQDLLPSGSVYSLPANADIEISLPATAAAPGFPHPFHLHGHTFAVVRSAGSSTYNYENPVYRDVVSTGSPGDNVTIRFRTDNPGPWFLHCHIDFHLEAGFAVVMAEDIPEVAATNPVPQAWSDLCPTYDALSPDDQ

SEQ ID NO: 52069 - protein, 473 aa, Glycine max
PGFEGSASVNSSPLQFFSMMSLSPSLGSPNNLFFREMKSEERGLYLIHLLLSCANHVAAGNLENANTTLEQISMLASPDGDTMQRIATYFMESLADRILKTWPGIHRALNSTRMTLISDEILVQKLFFELFPFLKVAFVLTNQAIIEAMEGEKVIHIIDLNAAEAAQWIALLRVLSAHPEGPPHLRITGVHQKKEILDQVAHRLTEEAEKLDIPFQFNPVVSKLENLDFDKLRVKTGEALAISSILQLHTLLAWDDETMQRKSPLLLKTSNGIHLQRVLPMGQSTLGDLVEKDMVNGYTLSPDSTSSSPASLTTSNSMNMESFLNALWGLSPKVMVVTEQDCNHNGPTLMDRLLEALYSFAALFDCLESTVSRTSLERLRVEKMLFGEEIKNIIACEGSERKERHEKLEKWFQRFDLAGFGNVPLSYFGMVQARRFLQSYGCEGYRMRDENGCVLICWEDRPMYSISAWRSRK

SEQ ID NO: 52070 - protein, 324 aa, Ralstonia solanacearum
MTKAIRIFETGGPEVMQLVDAEAPAPGPGEARIRQHAIGLNYIDVYFRSGLYPQPLPGGIGMEASGVVEAVGEGVTHVRPGDRVAYAGRPTGAYAEVRTMPADILVRLPEAIGFETGAAMMLQGLTAQYLLRDSYRVQPGDTVLFHAAAGGVGLIACQWLKALGATVIGTVGSDAKAALARAHGCDHTIVYTRENFTERVREITGGKGVPVVYDGIGKDTFSGSLDCLAPRGMMVSYGNASGPVPPFDLGVLSAKGSLKLTRPTLMTYTAQRALLEPMAAELFDVVGSGKVKIEIHQRYALADAAQAHRDLEARKTTGSTILLP

SEQ ID NO: 52071 - protein, 145 aa, Prosthecochloris aestuarii DSM 271
MDKTPASLPENIVIFDGVCNLCEFSVNFIFERDAAGQFYFTPAQSPLGASLLKRFDINTSRLDTVVLVRGDRAFTRSAAAIEIASRLDMPWNLLAVFLAVPEPLRDMIYDLIAQNRYQLFGKKETCMLPSEELRKRFLEQIPEAS

SEQ ID NO: 52072 - protein, 151 aa, Picea abies
MAMDPLLSTVQQLLGVPDDLERILHAPTRSYMRDTEATASTPVDVKEYPNSYVFIVDMPGLKSNDIKVQVEDENVLNISGERKRNEKEEGEVKYIRMERRVAKFMRKFSLPADCNLEAISAACQDGVLTVTVPKLPPPEPKKPKTIAVKIG

SEQ ID NO: 52073 - protein, 504 aa, Leptospira interrogans serovar Copenhageni str. Fiocruz L1-130
MTAILSFSFRIWNKIFFKKANRFFSLGFILFIQSGIYAVENPLPFDELRKGVVQIRVYSQAVNPFTPWTTDAVRAGSGTGFLIGNKRILTNAHVVSNAKFVQVQRYNQTEWYGVKILHLAHDCDLAVLEAENPEFYKDSRDLQLGEIPELNSPLIVVGYPIGGNKVSVTRGIVSRKDQSVYSHSAVDSHLVLQVDAAINPGNSGGPAIQDDKVVGVAFQVATKGENIGYLIPTNVIRHFLKDIEDGKYDGYVELGVRTLNSFNVFLRKAKGIPDHLEGVFVSKVLKNGSAENHLKEGDFLLEIDGQPIGKNGTVMQDKDARVDFVEIVDNKHAGDKISFKLYREGKEISVSFPARRMSDFDFMRNQYDRSYDFEMIGGLLFQEISRDLITSWGRSGNTSGGSQLLYRFFYFIEDGLNRTKKTDVVLYRKLSHPVNSSSDYFVNMILESVNGIPVGELKDLKKILKESKDKYLRLKFLDIQVPLILNREEAEKADEKIRKIYGLE

SEQ ID NO: 52074 - protein, 127 aa, Brassica napus
EASTGCRFLIRGRGSIKDQYKEEMMRGKPGFEHLSEPLHILVEAELPIEIVDARLMQAREVLDELLTPMEETHDFYKKQQLRELALLNGALREEGSPMSGSVYIYMLLLQFHFSYMILNSKVSNGKR

SEQ ID NO: 52075 - protein, 612 aa, Rubrobacter xylanophilus DSM 9941
MKGFERDRERVWEIAGRVRRARSLPEAFRMTVLEKAEKPALGEKVGGRWREFSFREVYRRVEDFASGLAGLGVERGSRVAIMSANRVGWTVADVAIMSLGAATVPIFPTLGPRQVAHILEDSGARVVVVEGERQLAAVRGSGASVEHLVCMDEASAGGGVLAFSEVERRGARSRDPGWEARMLSLRREDVATLIYTSGTSGRQKGVILTHGNLLSNLEAIIEVVPITDDDVGLSILPLSHVLERTCSQFLNLVGGGTNYIAESVEKVQENLLEVRPTALLVVPRLFERVFAVIREQGTANPVRARIFESAVRTARRKYRHDAGEEAMSLARRLLFGLYDLLVYRKVRAGLGGRVRFCVSGGARLEPWLGEFFYGAGVPVAEGYGLTETSPVISVNRFEDLRFGTVGPPLPNVEVRLSGEGEILVRGPSVTPGYHNLPEENAAAFTQDGFFRTGDIGSFDEGGRLKITDRAKDIMVLDTGKNVAPQPVETALANTAHIAQAMLVGDGRKFVSALIVPDFEAVRRTLGENLPAERLCADGRVRELIRSEMEEAAAEFPEHEQPKRFALVPREWTEEEGEITPTLKLRRSAVAARYRDLIEELYAAGSSPQPARR

SEQ ID NO: 52076 - protein, 277 aa, Yersinia enterocolitica
MSQNTLKVNELHEDVNFDENSTETEIFDEKQLVEDEPTEASSAEDELLAQGVTQRCWSTQLYLGEIGYSPLLTAEEEVYFARRALRGDVPSRRRMIESNLRLVVKIARRYSNRGLALLDLIEEGNLCLIRAVEKFDPEPGFRFSTYSHWWIRQTIERAIMNQTRTIRLPIHIVKELNVYFGTARELSHKLDHEPSAEEIAEQLNKPVDDVSRMLRLNERITSVDTPLGGDSEKSLLDILSDENENGPEDTTQDDDMKQSIVKWLFELNAKQREVLAR

SEQ ID NO: 52077 - protein, 536 aa, Arabidopsis thaliana
MNAAVFSPSALSLPISFSKTRSSFLSRKKGVKGEFRVFAVFGDESGLVEKKSQWRPLFDVEDPRSKAPPYKGKFLDVNQAIEVARFDIQYLDWRARQDLLTIMILHDKVVDVLNRLAREYKSIGTVKKELAGLQEELSKAHQQVHISEARVSTALDKLAHMEELVNDRLLPGRVVTELDKPSSSTTASAVELDREKTNTGAKSLNVSGPVPPYSPHLKNFWYPVAFTADLKHDTMVPIECFEQPWVIFRGEDGKPGCVRNTCAHRACPLDLGTVNEGRIQCPYHGWEYSTDGECKKMPSTKLLKVKIKSLPCLEQEGMIWIWPGDEPPAPILPSLQPPSGFLIHAELVMDLPVEHGLLLDNLLDLAHAPFTHTSTFAKGWSVPSLVKFLTPTSGLQGYWDPYPIDMEFKPPCIVLSTIGISKPGKLEGKSTQQCATHLHQLHVCLPSSKNKTRLLYRMSLDFAPILKNLPFMEHLWRHFAEQVLNEDLRLVLGQQERMLNGANIWNLPVAYDKLGVRYRLWRNAVDRGDDKLPFSG

SEQ ID NO: 52078 - protein, 505 aa, Streptococcus thermophilus CNRZ1066
MSKLFGKVTIRKKLTMTTAVVFFLVLSMFTLVVVFSANTLLLQRERQNVNNTISKVVTYIEKDWDSDEELSPEPLLAALYSPKNIYPSIINGVLSEKRSLDGQVAVSNRLYSNQSVYVYDKKGTFIFTSEEYTDSPPGMSEVNKLKLVSYKGKRGFLLQVPIYGKDKKTIVGYAQVFHDLEFYYALKERLIFLLIFLEVGMTVLVIAVTVVVLTSILRPMRQLHETMGIIIDSPSDLELRSKIESHDEIGALALNFNCMMDKIQENNQMQMRFLSDVSHELRTPIAVIKGHMDLLQRWGKNDPEILEESLEAASHEANRMTIMINDMLDSIRVKGSFDNHRNDTCDLNSSIRTVIGNFRVLHDDYQFYLNDSEGSDRPAQIYSQHFEQVITILIDNAVKYSPVNKKIQVTIKALEDEMLVQVQDNGEGISKEDIEHIFERFYRSDKARNRTTTQSGVGIGLSILYQIVEAYRCHIDVSSELGVGTRFDLYIPFAESETTTPQIEG

SEQ ID NO: 52079 - protein, 452 aa, Borrelia garinii PBi
MSKILVADDEKNIREGIATYLEDEGYFVFTASDGEEALETIENENLDVIISDLRMPQISGEKLLKIVKEKNLKIPFIILTAHGTVDSAVDAMREGAYDFLTKPLDLERLLLIIKRSLNKKENNNEENVNLENILIRKDLKYYEKIMGKSLLMQKIFELVIKIAKSNASVLITGESGVGKEIIADAIFDLSNRNDKPFIKVNCAALSESILESELFGHEKGAFTGAISKKKGRFELANKGTIFLDEIAEISPEIQVKLLRVLQNKTFERVGGETTIKVDIRLLAATNKNLEEEIKKGKFREDLFYRLNIININIPPLRERKDDISNLTSILIRDVAKENNRQEKTLSNDAIKALYYYDWPGNIRELKNVLESALILSKGKQITKEDLPAKIKNNENLIFKITLPIGISLKEAEKEIIKQTLFHSKNNKSKCAEILKIGRKTLHNKIIEYQIDQ

SEQ ID NO: 52080 - protein, 323 aa, Arabidopsis thaliana
  misc_feature (236)..(236): Xaa can be any naturally occurring amino acid
  misc_feature (280)..(280): Xaa can be any naturally occurring amino acid
  misc_feature (286)..(286): Xaa can be any naturally occurring amino acid
  misc_feature (293)..(293): Xaa can be any naturally occurring amino acid
  unsure (1)..(323): unsure at all Xaa locations
MVMIEGPVLLEDYHLIEKVANFTRERIPERVVHARGISAKGFFEVTHDISNLTCADFLRAPGVQTPVIVRFSTVVHERASPETMRDIRGFAVKFYTREGNFDLVGNNTPVFFIRDGIQFPDVVHALKPNPKTNIQEYWRILDYMSHLPESLLTWCWMFDDVGIPQDYRHMEGFGVHTYTLIAKSGKVLFVKFHWKPTCGIKNLTDEEAKVVGGANHSHATKDLHDAIASGNYPEWXKLFIQTMDPADEGKFDFDPLDVTKIWPEDILPLQPVGRLVLNRXIDNFFXMKTEQLXFNPGLVGSLGILLPQDGKACSNCRVLFAYW

SEQ ID NO: 52081 - protein, 447 aa, Thermoanaerobacter tengcongensis MB4
MSMDYERDFENNIEKKDPESMVPPQENLEDMPQEMSEKPSVDTASPAPKVEFRNNKKSIGRMVKRFRRKLIASFVAVALIAAIIGGGVTGAVMKYYGTQNDASTQVVTRYLPLDATSSDESGILNLIPNIYKIVSPAVVEIDTSTAYRSGYRTEYVPKGSGSGFIISTDGYIVTNNHVIEGASKITVKLLDGRSADAKLIGKDPRTDLAVLKINLPNLPVVKLGDSSKLQPGELAIAIGNPLGDSFAGTVTAGIISGLNRNLQSDYGPVKLIQTDAAINPGNSGGPLVNSKAEVIGITSVKLTSIGPSIQDPFGLFQGQSTPVEGMGFAIPINEAKPIIEQLIKHGYVERPMMGIGAQTITPQDAAQYNLPVGVYVVQVQPGSGAEKAGIQPGDVIIKADGKQIKSFEDLQSVINSHKVGDVINVTIWRNGRTFTVSVELQSSANFQ

SEQ ID NO: 52082 - protein, 464 aa, Geobacter sulfurreducens PCA
MKMVSLRFLKTMLTVICLMALSAGEVPAKVMAPDFVTLAEKLKPTVVNISTSKNPAQTARPRRQPSPFNDPFHDFFDRFFDEAPRRQQRERSLGSGFIISDQGFIITNNHVVAGADEIKVRLSDGREFKAELKGADEKLDLALIKIESKDQLPVAILGNSDEIKVGEWVMAIGNPFGLAQTVTAGIVSATGRVIGSGPYDDFIQTDASINPGNSGGPLFSAEGKVIGINTAIIAGGQGIGFAIPINMAKDVIPQLEEKGKVIRGWLGVTVQPITPDLARSFGLEGERGALIADVVKDGPAAKAGLKSGDIVLEFDGKKIREMNELPRIVAATPVGKAALVKVLRDGKMQDVEVSVGRLADTGDESDQKNGEDKLGMAVRELTRDLAARMGLKETQGVVVTGVKSGSLAEEAGILPGDIVREIGGRSITTMADYETAIRAVKKGDVVRFLLRRGGGNHFLAIRVE

SEQ ID NO: 52083 - protein, 268 aa, Yersinia pseudotuberculosis IP 32953
MERYQQLFKQLAAKKEGAFVPFVQLGDPSPAMSLNIIDTLIAAGADALELGIPFSDPLADGPTIQNAALRAFAAGVTPAICFEILAEIRQKHPTIPIGLLMYANLVFHNGIDHFYQRCAEVGVDSVLIADVPFEESAPFRAAALRHGIAPIFICPPNADDDLLREIASHGRGYTYLLSRAGVTGAENHGQLPLNHLVDKLREYNAAPALQGFGISEPAQVKASLAAGAAGAISGSAIVKIIEKNVAQPVEMLVQLTRFVTEMKAATRS

SEQ ID NO: 52084 - protein, 101 aa, Zea mays
PPFFFPMGFLRAISLLAPFRGAEIPCQKGFPVVINFLKERVPPIKFNFGKVFQSFVPILAQFLGGKPVKPSLFEFRGAPAVGVRFFPNQALQGWAQMMGSN

SEQ ID NO: 52085 - protein, 427 aa, Geobacter sulfurreducens PCA
MLTARSKDLFTQAQEFIPGGVNSPVRAFKSVGADPLFIKKAFGCTITDADNNSYIDYVGSWGPMILGHCHPQVVEAVKRAVESGSSFGAPTELEITLARMVIDAVPSIEMVRMVSSGTEATMSAIRLARGYTGRDKIIKFSGCYHGHADALLVKAGSGAATFGVPDSPGVPVDVAKNTLTAQFNDLDSVSKLIDENKNEIACIIVEPIAGNMGTVPPGEGFLEGLRSICDSEGIVLIFDEVMTGFRVAYGGAQELYGVTPDMTTLGKIIGGGLPVGAFGGKKDIMKLLSPSGGVYQAGTLSGNPLAMTAGIETLKLLQADGFYEQLEQTSRRLAEGITEAAKSAGYPIYPTRVGSMFCTFFTSNEVKDWPTATTCDTKAFAAFFRMMLEKGIYLAPSQFETAFVSIAHTEVEIEKTIVAARSCFAAL

SEQ ID NO: 52086 - protein, 315 aa, Corynebacterium diphtheriae NCTC 13129
MRAIYVQDDATLAVHDAPTPTLQPGEVLVQVKAAGVNRADLLQAAGHYPPPPGESEIIGLECAGVIVDAGTTSRNVGDKVACLLAGGGYAEYVAVPEGQLMPIPEGYSFAEAAAVVEVAATVWSNIGMLTGLKPEHMFLIHGGAGGIGTFAIQLAKHVGATVAVTAGSKEKLETCRELGADILINYREEDFAEVLKNKCDRILDIMGAKYLDQNVRALAMDGHQVTIGMQGGVKGELNIGRLLSKRGTISATALRARDREDKARIVASTVENVWPLLADGTIRHHIHATLPLEQAQRAHEMLKNGEVTGKLVLEV

SEQ ID NO: 52087 - protein, 225 aa, Leptospira interrogans serovar Copenhageni str. Fiocruz L1-130
MSLATILREGTSEEHKAAESSAFIRCFMKGILEKGTYARHLEAFYYVYESMEEELERNKNNLVLKSIYFPELYRKNALLEDLQFFYGTWKPNDHQPSVATQDYVKRIRKISETQPELLAAHSYVRYLGDLSGGQILKKVAARALNLPEGKGISFYEFPMIQDINGFKQNYRTALDSLPVNDSEKQSILAESKQVFLLNQGIFSELEQDLVSAIGKETYDSVLGKG

SEQ ID NO: 52088 - protein, 369 aa, Rubrobacter xylanophilus DSM 9941
MQIFEKLEEYRYEQVVFCHDKATGLKAIIVIHNTTLGPALGGCRMYPYESEEAAVVDCLRLARGMTYKAAVSGLNLGGGKSVIIGDPERDKSEALFRSFGRYIETLGGRYITAEDVGTSTEDMANIQVETSYVVGVDKTYGGSGDPSPFTALGVLQGMRACVEEVFGAPSLEGRTVAVQGLGHVGYHLCRLLDEEGANLIVADVRADRVEQAVEEFGAKPVPPEEIISASCDVFAPCALGAVVNDESLPRLRCQIIAGSANNVLLEPRHGEELARRGILYAPDYVINAGGLINVADELEGYNAQRATSRVMRIYDAVKGVIAISKRDGVPTHVAADTLALERINSIAGMVRLHTGHPYGHLQRRSRERL

SEQ ID NO: 52089 - protein, 492 aa, Mycobacterium avium subsp. paratuberculosis K-10
MTATISTPQYLLDQARRRFTPTLNTIPGMGAIEKRLLAHEWQTKVLAEPPAGSGLKPVLGDAGLPILGHIIELFRGGPDYALFLYRNHGPLIYLDSPIMPAVTALGPDATQAVFSNRNKDYSQKGWHPVIGPFFNRGLMMLDFDEHMYHRRIMQEAFTRSRLTGYVEHIDRVATAIVADWPTNDARFLFHPAMKELTLDIASLVFMGHEPGTDHDLVTTVNQAFTTTTRAGGAIIRQPIPPFKWWRGLRARQLLEDYFSERVKERRNATGNDMLTVLCHTEDDDGNSFTDDDIVNHMIFLMMAAHDTSTSTTTTMVYNMAAHPEWQERAREESARLGDGPLDIEALEKLETLELIMNESLRMVTPLPFNMRQAVRDTELLGHYIPAGTNITIWPGMNHRLPELWTDPDKFDPERFAEPRAEHKKHRYAFAPFGGGAHKCIGMVFGQLEVKTVVHRLLRRYRLELARPGYQPRWDYGGMPIPMDGMPIVLRPL

SEQ ID NO: 52090 - protein, 533 aa, Rubrivivax gelatinosus PM1
MVEGVNILANAVKVTLGPKGRNVVLERSFGAPTVTKDGVSVAKEIELKDKLQNMGAQMVKEVASKTSDNAGDGTTTATVLAQAIVREGMKYVAAGMNPMDLKRGIDKAVVSLVEQLKKQSKPTTTSKEIAQVGTISANSDDDVGQIIASAMDKVGKEGVITVEDGKSLNNELDVVEGMQFDRGYLSPYFINNPEKQSAVLDNPFVLLYDKKISNIRDLLPTLEQVAKSGRPLLIIAEEVEGEALATLVVNTIRGILKVVAVKAPGFGDRRKAMLEDIAILTGGKVIAEEVGLTLEKVTLADLGQAKRVEVGKENTTIIDGAGAAGDIEARVKQVRVQIEEATSDYDREKLQERVAKLAGGVAVIKVGAATEVEMKEKKARVEDALHATRAAVEEGIVAGGGVALLRAKQAAGAIKGDNADQDAGIKLILRAIEEPLRIIVTNAGDEASVVVNAVLAGKGNYGYNAANGTYGDMIEMGILDPTKVTRTALQNAASVAALMLTTEAMVAESPKDDAPAGGMPGGMGGMGGMGMDM

SEQ ID NO: 52091 - protein, 112 aa, Hordeum vulgare subsp. vulgare
MASETVVLKVAMSCGGCSGAVKRVLTKMEGVESFDIDMEQQKVTVKGNVKPEDVFQTVSKTGKKTAFWEAEEATPAAGAAAPEAAPAAPAPEAAPAADAAPAPEATPANTAA

SEQ ID NO: 52092 - protein, 249 aa, Brucella suis 1330
MMAAHLADRVKSIRAVLFDKDGTLIDFDRTWFSISWQLAQWSAQGDEVLARALLDAGGYDWLAERFRANSVIAAGTVEDIVSLWHPGLAGPQLRSLIEKYDAYCIAEGARSAIAIEAVHETLAVLRGAGYRLGIATNDSEAGARVTAKALGIDHLFDVMIGYDTAARPKPFPDPLLYFAEKLGLSPHEIAMVGDNLHDLETAHAAGAGLAVGVLSGNSPREALEPHADLVLESVAGLPAILQPFVLPSA

SEQ ID NO: 52093 - protein, 387 aa, Silicibacter sp. TM1040
MPVVNRIADFAEDMKTWRRHLHQIPELGLDTVKTAAYVTEILETFGVDEIHGGIAQNGIVAIINGQGEGPTLGLRADMDALPITEVRDLDYKSQTPGKMHACGHDGHTTMLLGAAKYLAETRNFKGRVALLFQPAEEIIGGAKIMVEEGVMERFDIKEVYALHNAPGLPVGHFMTTPGALMAAVDEFTINIKGLGGHGAMPHETRDPVMAACGMAQAIQTIVSRNHQATEDLVISVTQIHTGTVDNVIPETAYVNGTIRTFNPEVQKMVMARFDEIVKGCAVAYGVEAELDYEVGYPATINDAEKAAFATDIARDISGEANVQGDAGREMGAEDFSYMLEARPGAYLFLGQGDTAGLHHPEYDFNDEISPIGASFFARLVEKAQPAG

SEQ ID NO: 52094 - protein, 266 aa, Borrelia garinii PBi
MNIFSNEDLNIYLKSVREHKLITHEEEIKLASQIQRGNAQAKNKMINANLRLVLKIIKRYAGKGLKIEDLIQEGNLGLIRAAEKYDPNKNTKFSTYASFWIKQSLQRALNTKTRLVKVPYRKENLILQINKYLTEEEKSPKKEEIMKRFNLSPAQYIKIIPYLEKEYSLDKEIEGSENSTLLNLYEDNSFNPEITLEQDSTIKHLNYVLETKLNEKERYIIKKRYNLDNNPKKSTLKDISTELGISSETVRQIEKRVLKKLKEEIN

SEQ ID NO: 52095 - protein, 509 aa, Brassica juncea
MTSVNVKLLYHYVITNLFNLCFFPLTAIVAGKAYRFTIDDLHHLYYSYLQHNLITIASLFAFTVSGFGLYIATLPKPLYLVEYSCYLPPRHLKVSVSKIMDIFYQIKADTSSRNVACDDPSSLDFLRKIQERSGLGDETYSPEGLIHVPPRKSFAGSREETEKVIIGGIENLFENTKVKPKDIGILVVNSSKFNPTPSLSAMVVNTFKLRSNIKSFNLGGMGCSAGVIAIAIDLAKDLLHVHKNTYALVVSTEGITQGIYAEENRSMMFSNCLFRVGGAAILLSNKSGDRRRSKYELVHTVRTHTGADDKSFRCVQQGDDEDGKTGVCLSKDITNVAGTTLTKHIAICRPLILPLSEKFLFFATSVAMKLLKDKIKHYYVPDFKLAVDHFCIQPGGRAVIDELEKNLGLSPIDVEASRSTLHRFGNTSSSSIWYELAYIEPKERLKKGNKKGWQIALGLGFKGNSAVWVALNNVKASANSPWEHCIDRYPVKNDSDLSKSKTQVQNGRS

SEQ ID NO: 52096 - protein, 205 aa, Shewanella sp. MR-4
MSNIVWHQHSVDQAARAKLKGQNPVLLWFTGLSGAGKSTLAGALERALFEAGFHTYLLDGDNVRHGLCKDLGFSVADRDENLRRVGEVAKLMVDAGLVVLSAFISPTREERDSIRARFPTGQFIEVHVSTPLSICEQRDPKGLYVKARRGEISNFTGISSPYEAPLSAELTIDTSKGDLASQVRALIDYLTAIEVINPSRLTASA

SEQ ID NO: 52097 - protein, 402 aa, Triticum aestivum
  misc_feature (63)..(63): Xaa can be any naturally occurring amino acid
  misc_feature (66)..(66): Xaa can be any naturally occurring amino acid
  misc_feature (89)..(89): Xaa can be any naturally occurring amino acid
  unsure (1)..(402): unsure at all Xaa locations
MPALGTLSAGGAAAGVAGLLRLRRGPALASPLPAAARAGAVHDAGQLVWGRQLRPALVLPAGXLPXQASKRLTLRPPAASAEPAGEAKXPGLLEKYPAITTGFFFFMWYFLNVIFNILNKKIYNYFPYPYFVSVIHLLVGVVYCLLSWAVGLPKRAPINATLLKLLFPVALCHALGHVTSNVSFATVAVSFAHTIKALEPFFNAAATQFVLGQTVPLSLWLSLAPVVLGVSMASLTELSFSWKGFINAMISNISFTYRSIYSKKAMTDMDSTNVYAYISIIALVVCIPPALIIEGPQLMQYGLNDAIAKVGMTKFVSDLFLVGLFYHLYNQIATNTLERVAPLTHAVGNVLKRVFVIGFSIIIFGNKITTQTGIGTCVAIAGVAIYSYIKAKIEEEKRAKAA

SEQ ID NO: 52098 - protein, 145 aa, Thermoanaerobacter tengcongensis MB4
MSLMRRGRDWWDWPFDINIRNLPSIFDINFPSLSGLFSRPRVDIVESETEIVATAELPGVDKKDIEINVYDNILEIKGQTSVDEEKEDKNYYIRERYYGSFARRIELPAEVDPERTTAKFENGILKITMPKLHPSKPKKRRIDIE

SEQ ID NO: 52099 - protein, 354 aa, Glomus mosseae
MAVANKSNTQTLAKYLSLDQGGKIQAEYIWIDGDGGLRGKTTTLDFKPTDVSELKEWNFDGSSTNQAPGDNSDILLRPCAIFKDPFRGGDNILVLAECYNNDGTPNRTNYRHSCTKLMSAHSEAKPWFGIEQEYTLFDMDGQVLGWPKGGFPGPQGPYYCSVGANVAFGRDVVEAHYRACLYSGVNISGVNGEVMPGQWEYQVGPCEGIDMGDHLWVSRYLLQRVAEDFGIVVSFHPKPIKGDWNGAGCHTNYSTEAMRIEGGIKAIHDAIDRMSKRHAEHIAVYGEDNDKRLTGRHETGHISEFSFGVANRGASIRIPRHVAAQGYGYFEDRRPASNIDPYRVTEVIVESTLG

SEQ ID NO: 52100 - protein, 198 aa, Arabidopsis thaliana
MESNNNNLNLDMEKDQETTFDYSKRAQWLRAAVLGANDGLVSTASLMMGIGAVKQDVRIMLLTGFAGLVAGACSMAIGEFISVYSQYDIEVAQMKRESGGETKKEKLPSPTQAAIASALAFTLGAIVPLLAAAFVKEYKVRIGVIVAAVTLALVMFGWLGAVLGKAPVVKSLVRVLIGGWLAMAITFGFTKLVGSHGL

SEQ ID NO: 52101 - protein, 132 aa, Geobacter sulfurreducens PCA
MIMPLINGLKITLKHMFMKPVTLQYPDERPTPSPNFRGLHALKVSHDKAKCVACYLCPTVCPAKCITVEAGEDATHDKYAERYEIDMLRCIFCGYCVEACPVDALKMTGQFELANYKREDFIFVKERLLEKK

SEQ ID NO: 52102 - protein, 622 aa, Synechococcus elongatus PCC 6301
MIAMHGVPIARRLMTEDGSLVYDPEAIARYYLNRPFAVWSRFLEILWPLFSFIFGLWFDARTGASRRNQNQRAVQLRDLLTELGPAFIKVGQALSTRPDLVPPAYLEELTRLQDQLPAFPNAIAFEFIEAELGVPPEAIFAELSDNPVSAASLGQVYRGRLHTGEEVAVKVQRPGLAERIALDLYILRGLAAWAMRNVRRVKSNLVAIADEFGLRIFEELDYRQEADNAERFAELYGQLPDIYVPSIYRQYTSRRVLTMEWIQGTKLTELQAIRNQGIDPAYLIERGVQCSLRQLLEYGFFHADPHPGNLLATPDGQLAYLDFGMMSQVEDYQRYGLIEAVVHLVNRDFQGLARDYVKLEFLTPDTDLTPIIPALAGVFKDAMGASVADLNFKSITDQLSQVMYDYPFRVPAYYALIIRSLVTLEGIAINVDPNFKVLSKAYPFIARQILTDPSPDLRASLRELLFNGGQLRWNRLENLLRNASNSSDYDSEHLIQQTVDFLLSESGQDLRDRLVEELVNSLDRLGRGALPLLRNQIRQRLGMDPEPDSTLTDLQPLLRVLSLLQQGQRFEPQRFIPLIPVLGRPEVQQMGQQVVTGLAQKALVRFIREVVVGDRRNNAIAA

SEQ ID NO: 52103 - protein, 639 aa, Thiobacillus denitrificans ATCC 25259
MCGITGIFDTSGVNAISRDLLQRMNETQHHRGPDEGGLHLEPGLGLGHRRLSIIDLSSGQQPLANEDGSVVVVFNGEIYNFQELVPELEALGHVFRTHSDTEVIVHAWEAWGEACVARFRGMFAFVLWDRNQETLFVVRDRFGVKPLYYAFLDTGEFIFGSELKSLMVHPSLGREVDPLAVEDYFAYGYVPEPRTIFKRVHKLPPGFTLTLKRGAPRALPKQYWDMPFAPVAVKDEAGAMDELVERMKESIRLRMIADVPLGAFLSGGVDSSAVVAMMATQSSTPVNTCSIGFDDPAFNEIEYAQQVADRYHTRHHVETVAADDFSLVGKLAQVYDEPYADSSALPTYRVCELARKHVKVALSGDGGDEHFAGYRRYRWFRYEERMRSIIPLGLRRPLFGTLGLLYPKADWAPKMFRAKTTFEALARDTVEGYFHGVSLLSNAQRAQLFSPAFRRELQGYQAVDVLRRHAAVAPTDDPLSLVQYLDMKTYLVGDILTKVDRASMAHALEVREPLLDHELMGWVSGLPVDLKLRGSEGKYLLKKAMEPYLPHDVLYRKKMGFSVPLAAWFRGPLAATIRTVVLGERLAGTGMFNCEFLREVVEAHQSGRRDFSVILWTVLMFDAFLGQVLGLDDTAREAA

SEQ ID NO: 52104 - protein, 229 aa, Paracoccidioides brasiliensis
MASSKAVSRLIAYRRPALLQISPQSSTHLRSTPAFSFSTSSPVSATPAGPPRQGFRLPPPKAWDQGDESALDKAGKYFLMTEMLRGMYVVLEQFFRPPYTIFYPFEKGPISPRFRGEHALRRYPSGEERCIACKLCEAICPAQAITIEAEEREDGSRRTTRYDIDMTKCIYCGFCQESCPVDAIVESPNAEYATETREELLYNKEKLLANGDKWEPELAAAARADAPYR

SEQ ID NO: 52105 - protein, 242 aa, Prochlorococcus marinus subsp. pastoris str. CCMP1986
MFEFLKKLMTNNESVSAKETNFLHRILNTDIKQEPKSQEDEIIFGCGCFWGAEKCFWKLPGVITTSVGYAGGEKNNPTYYEVCSGITGHAEVVRVVWNVNEIDISDLLKMFWECHNPTQKNRQGNDMGTQYRSTIYYKNDINKDKIYSSKEAFQKELYKNNLGIIETEIKKIDTYYYAEEYHQQYLAVEGSRQYCSASPTKVKLGSFNNCNYKLPTKTWDNFNWDIDKCVLRSNNNPIDINN

SEQ ID NO: 52106 - protein, 264 aa, Streptomyces coelicolor A3(2)
MRASLIQIAVNEDETVEARRVRAAALVREQAGADLVVLPELWTTGAFAFEEFDAAAEPLRGPTYEAMAKAASDAGVWLHAGSVPERGPDGRLYNTSLVFSPAGDLTASYRKIHRFGFDKGEAVLMGAGREPVTVRLPDTTLGVATCYDLRFPELFRSLVDAGAEILVVPAGWPERRRAHWTLLARARAVENQAFVLACGTAGTHAGVPQAGHSIVVDPWGEVLAEAGADEEVLAVEFDPERVARTREQFPALKDRVLGLEPPRG

SEQ ID NO: 52107 - protein, 307 aa, Pseudomonas syringae pv. phaseolicola 1448A
MSFPRVALIGECMIELQQHADGSLRQSFGGDTLNTAVYLARLLGERAKVDYVTALGDDSFSDAMCRIWADEGIGLGKVQRLPGRLPGLYCIQTDANGERRFLYWRNEAAVRDCFMTPAAEPILAALASYDVLYFSGITLAVLGEQGRARLLEALDRARQRGVRVAFDNNYRPRLWASVEQAREAYQACLQHVDLALLTEDDEQALYGYADSEQLLAAYRGRGIGEIVVKRGAQSCLVEAGGERFDIASQKVEHVVDTTAAGDSFSAAYLAARLMGEHPRQAAEAGHRLASVVIQHPGALVPKSVMPV

SEQ ID NO: 52108 - protein, 481 aa, Silicibacter pomeroyi DSS-3
MRRLRKVKIVATLGPASETYETIRALHEAGADVFRLNMSHGTHDEIRAKHQIIRQVEQDLDSPIAILADLQGPKLRVGTFVNEAEELAEGAAFRLDLDPAPGDAGRVCLPHPEIFQVLEPGAHLLVNDGKIRLKVLDCGPDFAECTVVTGGTISNRKGVNVPDVVLPLAALSDKDRDDLEFACALGVDWLALSFVQRARDVFEARALADGRAAILSKIEKPAAVEAFDAILDASDGIMVARGDLGVELPVAAVPPIQKRLVRKCRAAAKPVIVATQMLESMIESPMPTRAEVSDVATAIYEGTDAIMLSAESAAGQYPLEAVRTMDNVAVEVEADPTYTQIIAASRTAKGTTIADGIVAAAREIAEKTDIKAICCFTQSGTTALLTARERPGVPIIAMTSLLATARRLCLSWGCHCVITPELERFKGAVVNAARAARAGGFAIETDQIVVTAGVPFNVPGTTNILRVAPCDERLIYNTDPG

SEQ ID NO: 52109 - protein, 458 aa, Burkholderia pseudomallei K96243
MNGRDGRECARGTRRARFPTIVFSPLDAACIASLTMDIDQYMTDVGRRARRASREIARASTAAKNAALEAVARAIGRDADALKAANARDVARAKDKGHDAAFVDRLTLSDKALKTMIEGLRQVATLADPIGEMSNLKYRPSGIQVGQMRVPLGVIGIIYESRPNVTIDAAALCLKSGNATILRGGSEALESNTALAKLIGEGLAAAGLSQDAVQVVGTADRAAVGKLITMTEYVDVIVPRGGKSLIERLINEARVPMIKHLDGICHVYVDDRASVAKALAVCDNAKTHRYGTCNTMETLLVARGIAPAVLTPLGRLYREKGVELRVDADARAVLEAAGVGPLVDATDEDWRTEYLAPVLAIKIVDGIDAAIEHINEYGSHHTDAIVTEDHDRAMRFLREVDSASVMVNASTRFADGFEFGLGAEIGISNDKLHARGPVGLEGLTSLKYVVLGHGEGRE

SEQ ID NO: 52110 - protein, 606 aa, Thiobacillus denitrificans ATCC 25259
MDGIFGWLGADGAHQDLIRQIAGGDADAAGLRRYHSAELGLAAQSRFGKADIAVEDGHAVALMGRPRFVDADLARVARETGPAAAVAQGWRSHGAGLPARMQGNFAFAVLEPQAKKACLVLDRMGAERLGYAHRGDQLVFGSSVQHVAAHPAVGRNIEPQAIYDYLYFHNIPAPRSLYRGVHKLLPGQIVTLENGRLATRFYWHADYTPHDAGFDVQRDAFRRVLDAAVRDADGPATAAFLSGGTDSSTVVGALTAARGGPVDTFSIGFDAEGFDEMAYARCAAARYDSRRHEYYLKPADIVTAIPLIAREYDEPFGNDSAVPTYFCARAAREAGFGRMLAGDGGDEIFGGNARYAKQKLFENYFRVPAPLRHGLIEPLATLPGVSDHFPLSKLKSYVRQANMGLPLRMESYNFLHRTPLDQIFAADFVAAVDPSAADAALTEVYARTASDHYINRMMHLDLKFTLADNDLRKVGTMTEAAGVEVAYPLLDDRLVALANHLPVDWKVRGQALRWFFKEALRDLLPEEIINKRKHGFGLPFGVWSTQHAPLAELVHDSLSDFKRRGWVQPGYLDHMLAMQRGPHASYYGVMIWVVMMLERWLQANAH

SEQ ID NO: 52111 - protein, 619 aa, Auricularia polytricha
MALLPLLLLAAYAAPGLGALVEKWWDITFVNANPDGLFERRVVGVNGSWPPPPIELTVNDTLRVHATNKLDKPTTLHHHGMFFNGTSYFDGAAGVSQCGIPPGETFTYDVDVANSGQWGTYWVHSHASGHYVDGLRAPVVIHNVPETHVYDDEFTVVIGDWYHDQHEDLLKQFISRGNPGGAEPVPDSALIYFTHNGQYLRSSTNPNAVGFSENATLPFEPGKTYRLRIVNTSAFSMFFFWIDGHDMRVIEVDGTDVQEFPASLLSLTVAQRYSVLVTARNDTSSNFLLHANMDTDMFDVVPDGLNPNTTATIVYDKNAATADGVDKDAYFDFPDISLVPIIQEPQQKATHQIVLNVLFDTMTDGTNRAMFNNITYNTPVVPSIFSELSLGQDAVQAQLYGPTSFVLNQFDVVEIKVVNFDAGKHPIHLHGHKFQIVHKSTDFTSDDPTLNPPLMEGQLNPVRRDTVQVPSMGSASLRFVADNPGAWFLHCHIEWHLEAGLAVTFFEAPLEAQQKLKPPQFMFDQCKAMGVPTAGNAAGHTGADLSGLKVGPFQQKLGWRPKGIVAMTGCVLTATLGMLTVAWYAWGGHISDEEVEDEVRRRQEARSARPSIFSRMKKN

SEQ ID NO: 52112 - protein, 620 aa, Auricularia polytricha
MALLPLLLLAAYAAPGLGALVEKWWDITFVNANPDGLFERRVVGVNGSWPPPPIELTVNDTLRVHATNKLDKPTTLHHHGMFFNGTSYFDGAAGVSQCGIPPGETFTYDVDVANSGQWGTYWVHSHASGHYVDGLRAPVVIHNVPETHVYDDEFTVVIGDWYHDQHEDLLKQFISRGNPGGAEPVPDSALIYFTHNGQYLRSSTNPNAVGFSENATLPFEPGKTYRLRIVNTSAFSMFFFWIDGHDMRVIEVDGTDVQEFPASLLSLTVAQRYSVLVTARNDTSSNFLLHANMDTDMFDVVPDGLNPNTTATIVYDKNAATADGVDKDAYFDFPDISLVPIIQEPQQKATHQIVLNVLFDTMTDGTNRAMFNNITYNTPVVPSIFSELSLGQDAVQAQLYGPTSFVLNQFDVVEIKVVNFDAGKHPIFHLHGHKFQIVHKSTDFTSDDPTLNPPLMEGQLNPVRRDTVQVPSMGSASLRFVADNPGAWFLHCHIEWHLEAGLAVTFFEAPLEAQQKLKPPQFMFDQCKAMGVPTAGNAAGHTGADLSGLKVGPFQQKLGWRPKGIVAMTGCVLTATLGMLTVAWYAWGGHISDEEVEDEVRRRQEARSARPSIFSRMKKN

SEQ ID NO: 52113 - protein, 585 aa, Prochlorococcus marinus subsp. pastoris str. CCMP1986
MTQIDSKKKFDRLRLCKLLETIYKEHTTEELNLICNQLLQILDNFSEKSRYEEISEDKKWDESFAVLITYADGVYKKGETTLVTLRELLSKNFGSLSKVVHILPFLKSTSDGGFAVSSHTSLEEKFGSWEDLKSISNKHYLMADLVLNHVSSSHPWVQQFIKCQEPGLSNVFSPSQDLDWKNVIRPRSSSLFSQINTDDGQKQVWTTFGPDQIDLNWLNPKMTIEFLNLIITYLSNGIKWLRLDAVGFIWKEPGTTCLHLSKAHSIVKILRILLNDLLKDGVLITETNVPQKENLSYLLPEDEADMAYNFPLPPLLLEAIISSRADILNAWICDWPELPKTTTLFNFTASHDGVGLRALEGLMNEQRIKDLLINCEKRGGLVSHRRLSNGEDKPYELNISWWSAMEDPGRDSNRYQYERFLLTQLLVMSLKGVPAFYLPALLASENDIKSFSMTGQRRDLNREKFKSEKLAAVFNNPESNANKNLKYLRHAMDVRAKLPQFHPQSHMECLSKNRADIVALKRGIGSKAVFTIHNMTENKINYRFIDYEFNKLIKNDLNMQDYLTSNKYNSNNIELDPFQVIWLGF

SEQ ID NO: 52114 - protein, 341 aa, Escherichia coli O157:H7 EDL933
MKALSKLKAEEGIWMTDVPVPELGHNDLLIKIRKTAICGTDVHIYNWDEWSQKTIPVPMVVGHEYVGEVVGIGQEVKGFKIGDRVSGEGHITCGHCRNCRGGRTHLCRNTIGVGVNRPGCFAEYLVIPAFNAFKIPDNISDDLASIFDPFGNAVHTALSFDLVGEDVLVSGAGPIGIMAAAVAKHVGARNVVITDVNEYRLELARKMGITRAVNVAKENLNDVMAELGMTEGFDVGLEMSGAPPAFRTMLDTMNHGGRIAMLGIPPSDMSIDWTKVIFKGLFIKGIYGREMFETWYKMAALIQSGLDLSPIITHRFSIDDFQKGFDAMCSGQSGKVILSWD

SEQ ID NO: 52115 - protein, 377 aa, Thermus thermophilus HB8
MEVARGLEGVLFTESRMCYIDGQQGKLYYYGIPIQELAEKSSFEETTFLLLHGRLPRRQELEEFSAALARRRALPAHLLESFKRYPVSAHPMSFLRTAVSEFGMLDPTEGDISREALYEKGLDLIAKFATIVAANKRLKEGKEPIPPREDLSHAANFLYMANGVEPSPEQARLMDAALILHAEHGFNASTFTAIAAFSTETDLYSAITAAVASLKGPRHGGANEAVMRMIQEIGTPERAREWVREKLAKKERIMGMGHRVYKAFDPRAGVLEKLARLVAEKHGHSKEYQILKIVEEEAGKVLNPRGIYPNVDFYSGVVYSDLGFSLEFFTPIFAVARISGWVGHILEYQELDNRLLRPGAKYVGELDVPYVPLEARE

SEQ ID NO: 52116 - protein, 438 aa, Brucella suis 1330
MSEDSGRAGPEARTETSLFEPLLRIKGVLFVSMVLAICVMALDLSFWFRAILLALVVLGAVWAAAGIGNGEDEKVPLREVASREMAAVSGERLADLLTDPMIVFDHTATVRFANVAALEAFQSLQNGTALYLRFRAPEMLALIQGVIADGEPRNIEYFERVPIDRWYKAMVKALRDAEGKPELFVLIFRDQSETRRIDRMRSDFIANASHELRTPLASLRGFIETLQGPARNDAAARDRFLDIMQKQAERMSRLIDDLLSLSRLEMRAHLAVNESVDVAATLAHVADTLTPLAAGLGVTIERHLPEHPVHVMGARDELIQVFQNLVENACKYGQEGKRVIIRLSEEDTGNATEVVASIQDFGPGIAAEHLPRLTERFYRIDVETSRAHKGTGLGLAIVKHILARHRGRLVVRSQLGEGSTFMVRLPGQNARSAEAATI

SEQ ID NO: 52117 - protein, 262 aa, Oceanobacillus iheyensis HTE831
MGKSKLDAVLKEKTQAKKPIFVPYIMAGDGGIDNLNKRIQFLEEAGASAVELGIPFSDPVADGPVIQDAGQRALANKTTIGSVLEALESEKSQRNIPVVLMTYINPVWKYGFEQFARDCSQAGVDGIIIPDIPMEEEDDVASSLTQHDIAFIRLAAMTSTEDRLERIAKRSEGFLYAVSVTGTTGERAQHENDAFHFLEKLKQISHVPVLAGFGISTAERARELSAACDGVVVGSKIVQLFEQGDEDGIHSLIRESIGEKVI

SEQ ID NO: 52118 - protein, 495 aa, Sulfolobus tokodaii str. 7
MVKVDPYLNVDAGTMNPYMHGEVFVTDDGAETDLDLGHYERFVGINMYSYNNITAGKVYFEVIKNERQGKYLGQTVQIIPHVTDQIKSMIRYASNMANADITIVEIGGTVGDIEGLPFLEAVRQLKLEEEEGNVVFVHVALVEFLKVTEEIKTKPLQHSVQELRRIGIQPDIIVARSVVPLDEETKKKIALFTNVKPEYIFSNYDVNMTYEVPLILEKQGLASKILSKLNLPDNQPNLSEWIRFIDNLKTADKEVKIALVGKYTKLKDSYISIKEAIYHAAAKLHIKPVLVWIESTDIENSKEAIDKLKSVDGIIVLPGFGSRGVEGKILAIKYARENNVPFLGICYGMQLAVVEFARNVLGLEKAHTTEVDPNTPHPVITLLDEQKKVVQIGGTMRLGSQKVIVKEGTLAYRIYGNIEVYERHRHRYEVNPEYVDLLQKGGLVISGVSENGLVEMIELKNHKFFLGLQGHPEYKSRPLAPSPVFIGFLRAAAGV

SEQ ID NO: 52119 - protein, 405 aa, Euphorbia esula
MAAEMALVKPITPKFINPMRTFSSSSKFSTIKMSATSQSNTTTTATKPSKKGNKKEINETLLTPRFYTTDFDEMETLFNTEINKKLNQSEFEALLQEFKTDYNQTHFVRNKEFKEAADKMQGPLRQIFVEFLERSCTAEFSGFLLYKELGRRLKKTNPVVAEIFSLMSRDEARHAGFLNKGLSDFNYALDLGFLTKARKYTFFKPKFIFYATYLSEKIGYWRYITIYRHLKENPEYQCYPIFKYFENWCQDENRHGDFFSALMKAQPQFLNDWKAKLWARFFCLSVYVTMYLNDCQRTAFYEGIGLDTKEFDMHVIIETNRTTARIFPAVLDVENPEFKRKLDRMVVINQKLQAVGETEDNSVVKNLKRVPLIAALVSEILAAYLMPPIESGSVDFAEFEPKLVY

SEQ ID NO: 52120 - protein, 316 aa, Thermoanaerobacter tengcongensis MB4
MKGMKMMITTVTANPAIDRTVIVENLRLGSVNRVIRSRVDAGGKGINVAKNLKNLGDEVITLGFLGPNAQYIIDCLEEEGIKSDFVKIKNDTRTNIKISDISRGEVTDLNEYGPEVSEEEIELLKESIFRYAEKSKVLVLSGSLPLGVPKTFYKEIIKEVKNKDLKIILDADNQALFYGIEERPFMIKPNLHELEDIVGRKLETLEEIIEEGKKLNKKGIEIVAISMGKEGSVVITDDAVFRVKPLKVEVKGTVGAGDAYVAGFAHGIYRGLSLEETIKIAAALSTSVVMKEGTGAGTIEEVNALKDKIEIERIER

SEQ ID NO: 52121 - protein, 551 aa, Arabidopsis thaliana
MVETGHHHQHPPAPAAAGHPPVPSMAMARNMGTTWPPAEQLHHLQYCIHSNPSWHETVVLAFQHYIVMLGTTVLIANTLVSPMGGDPGDKARVIQTILFMSGINTLLQTLIGTRLPTVMGVSFAYVLPVLSIIRDYNNGQFDSEKQRFRHTMRTVQGSLIISSFVNIIIGYGQAWGNLIRIFSPIIVVPVVSVVSLGLFLRGFPLLANCVEIGLPMLILLIITQQYLKHAFSRISMILERYALLVCLAIIWAFAAILTVSGAYNNVSTATKQSCRTDRAFLMSSAPWIRIPYPFQWGTPIFKASHVFGMFGAAIVASAESTGVFFAASRLAGATAPPAHVVSRSIGLQGIGVLLEGIFGSITGNTASVENVGLLGLTRIGSRRVVQVSTFFMIFFSIFGKFGAFFASIPLPIFAGVYCILLGIVVAVGISFIQFTDTNSMRNMYVIGVSLFLSLSIAQYFLANTSRAGYGPVRTAGGWFNDILNTIFASAPLVATILATILDNTLEARHASDDARGIPWWKPFQHRNGDGRNDEFYSMPLRINELMPTRFL

SEQ ID NO: 52122 - protein, 187 aa, Triticum aestivum
MGASESVLETSVHEFTVKDCNGKEVCLDTYKGKVLLIVNVASKCGFTETNYTQLTELYQKYREKDFEILAFPCNQFLRQEPGSDQQIQDFACTRFKAEYPVFQKVRVNGPDAAPLYKFLKANKPGLFGSRIKWNFTKFLVDKNGKVINRYATATTPFSFEKDIQKALEEEPSDSQTKKEEESSDSQK

SEQ ID NO: 52123 - protein, 206 aa, Cryptococcus neoformans var. neoformans JEC21
MATRKKHLLKVIILGDSGVGKTSLMNQYVNKRFSTQYKATIGADFLTRELVVDDRVVTMQLWDTAGQERFQSLGVAFYRGADCCVLVYDVNSNKSFEALDGWRDEFLVQASPHDPENFPFVVLGNKIDMEESKRMVSQKRAMTWCQAKGNIPYFETSAKEAINVEQAFQTIAKNALAQEAETELYADYPDPIRIDSESTQNYGCNC

SEQ ID NO: 52124 - protein, 188 aa, Glycine max
MRSSNGASSSRASNANTGRHPVYRGVRRRSSGKWVSEIREPKKPNRIWLGTFATPEMAAIAYDVAALALKGKDAELNFPNSASSLPVPTSSAARDIQMAAASAAAAVGAANDALEGSRGGNASVSLTEEFSGGNLNHFVDEDLIFDMPNILVNMAEGMLLSPPRFDNFAATDYEYMDEDPNLWGFPNY

SEQ ID NO: 52125 - protein, 453 aa, Brucella suis 1330
MNLFTSQFRNSQLLASKAHALIPGGCHTYAKGDDQYPVLAPGFIQRGSGAHVFDVDGHEYIEYGMGNRAVGLGHAYPPVVRAVREALQDGCNFTRPSAIELDCAESFLELIEGAEMVKFCKDGSDATSGALRLARAYTGRDMVACCADHPFFSTDDWFIGTTKMSAGIPASVSALTATFRYNDIASVEALFEDYPGRIAAIIMEPARADEPQDNFLHEAMRIAHENGALFILDEMITGFRWHMRGAQKLYGIVPDLSCFGKALGNGFAISALAGKAEYMRLGGLHHTDFPRVFLLSTTHGAETHAMAAAIATMAIYRDEPVIERLYEQGAKLAAGINEAIAGHRLQDHVRLSGRPCCLTYSTLDGNGMPSQAFRILFLQETIRRGVLMPSLVVSYTHSDADIARTIDAVHGALGIYVRALNDGVESCLVGRPSQVVYRRFNEDPASSCPPPRL

SEQ ID NO: 52126 - protein, 183 aa, Shigella flexneri 2a str. 301
MQDSILTTVVKDIDGEVTTLEKYAGNVLLIVNVASKCGLTPQYEQLENIQKAWADRGFVVLGFPCNQFLEQEPGSDEEIKTYCTTTWGVTFPMFSKIEVNGEGRHPLYQKLIAAAPTTVAPEESGFYARMVSKGRAPLYPDDILWNFEKFLVGRDGKVIQRFSPDMTPEDPIVMESIKLALAK

SEQ ID NO: 52127 - protein, 755 aa, Ralstonia solanacearum
MAKSKITEVESKESAASARAAKTGTARTSTAKPNKAADADTKRTVREAEAIPTPTSPAPRAEAAAEPKKRGRKPRAGAQADDESSTDVTEEFDEAPAAPAPKSDKQKARDRKAKEKALLKEFAATQQGGSEEELEARRQKLKALIKLGKSRGYLTYAEINDHLPDDMVDAESMDTLVATLNDIGIAVYEQAPDAETLLLNDNAPSVTTEEEAEEEAEAALSTVDSEFGRTTDPVRMYMREMGTVELLTREGEIEIAKRIEAGLKDMVMAISACPVTISEILAMGERVANDEAKIDEYIDGLIDPNADAAEAAQAGDEDEDFEDEDADESGDEEEDEDDDGSGSSAASARQLEELKQAALAKFAIIGDQFEKMRRAFEKEGYKSKPYLKAQEAIQNELMTIRFTARNVERLCDTLRGQVDEVRKLERAILNIVVDKCGMSRGDFVSRFPGNETNLGWINTVVADGKPYSAIVERNIPAVHELQQKLIDLQARVVLPLAELKDVNKKMSEGERRAREAKREMTEANLRLVISIAKKYTNRGLQFLDLIQEGNIGLMKAVDKFEYRRGYKFSTYATWWIRQAITRSIADQARTIRIPVHMIETINKMNRISRQILQETGNEPDPATLAEKMEMPEDKIRKIMKIAKEPISMETPIGDDDDSHLGDFIEDTNTLAPAEAALHGSMRGVVKDVLDSLTPREAKVLRMRFGIEMSTDHTLEEVGKQFDVTRERIRQIEAKALRKLRHPSRSDKLKSFLEGS

SEQ ID NO: 52128 - protein, 139 aa, Brassica napus
  misc_feature (31)..(31): Xaa can be any naturally occurring amino acid
  unsure (1)..(139): unsure at all Xaa locations
HSDTSPDLKVVGSKLKDILEVPPTSLKMRKXVVISLCNIIATRGARLSAAGVDPGVRKKLGRDAPKDGEATQKSVIAMDGGLFEHYTQFSECMESSLKELLGDEASGSVEVIHSNDGSGVGAALLAASHSQYLEDSETS

SEQ ID NO: 52129 - protein, 417 aa, Streptomyces coelicolor A3(2)
MTESTAARKPRRSAGSKAAGTTGTKAAGTTGSKAGTGKRTTRTTSTTRTAAEKGSDTELVQLLTPEGERVEDAAHAEYASYVADITPDELRGLYRDMVLTRRFDAEATALQRQGELGLWASLLGQEAAQIGSGRATREDDYVFPTYREHGVAWCRGVDPTNLLGMFRGVNNGGWDPNSNNFHLYTIVIGSQALHATGYAMGVAKDGADSGVIAYFGDGASSQGDVSEAFNFAAVYNAPVVFFCQNNQWAISESNEKQTRVPLYQRAQGFGFPGVRVDGNDVLASLAVTRWALDRARRGEGPALIEAYTYRMGAHTTSDDPSRYRHDDERAAWEAKDPILRLRRFLESANHADEGFFAELEAESETLGKRVREVVRAMPDPDRFAIFENVYADGHALVDEERAQFAAYQASFADAEGV

SEQ ID NO: 52130 - protein, 127 aa, Prosthecochloris aestuarii DSM 271
MATISRKKKKVKVTPEGAVHIKASFNNVLVTITDMQGNTVSWSSAGKNGFKGSKKNTPYASQVTSEAAAKEAFDLGMRYVHVFIKGPGSGRDAAIRALQGAGLDVKTIKDITPLPHNGCRPPKRRRV

SEQ ID NO: 52131 - protein, 543 aa, Campylobacter jejuni RM1221
MKQTKYIFVTGGVLSSLGKGIAAASIATLLKNSGLKVSILKADPYINVDPGTMSPFEHGEVFVTDDGAETDLDLGHYERFLDESLSQDNNFTTGRVYQSVIEKERRGEYLGKTIQVIPHIVGEIKDRIKKAGEGKDILIVEIGGTVGDIEGLPFLEAIRALRLEVGKNNAMNIHLTLVPFIKAAGELKTKPTQHSVGELRRIGISPDMIICRSEKALDRDLKDKIAISCGVEKNCVIESVDAASIYQIPLNFLKQDILSPIAEILDLKNLKPNMENWDSLVKRVIAPSNEVKIAFVGKYVDLKESYKSLTEAIIHAGAALDTKVELKWVDSEKLENMESSEVFKDVSGILVAGGFGYRGVEGKIKAIQYARENKIPFLGICLGMQLALVEFARNVLKLKDANSSEFNEKCQNPVVYLIDEFMDTNGEKQIRTAKTPLGGTMRLGAYKCDIKEKSLLAKVYNEVKSVKERHRHRYEANPKYRADFEKHGLIVSGESKGLIEAVELNCHPFFLAVQFHPEFTSRLEHVNPVICSFIKAAINYEDN

SEQ ID NO: 52132 - protein, 358 aa, Acinetobacter sp. ADP1
MFIKNAWYVACRPEEIQDKPLGRTICGEKIVFYRGKENKVAAVEDFCPHRGAPLSLGYVEDGHLVCGYHGLVMGCEGKTIAMPAQRVGGFPCNKAYAVVEKYGFIWVWPGEKSLANEADLPTLEWADHPEWSYGGGLFHIQCDYRLMIDNLMDLTHETYVHSSSIGQKEIDEALPVTKVDGDHVVTERYMENIIAPPFWQMALRGNHLADDVPVDRWQRCHFFAPSNVHIEVGVAHAGHGGYNAPKDKKVASVVVDFITPETETSHWYFWGMARNFQPENQQLTDQIREGQGKIFTEDLEMLEQQQQNILRNPQRQLLMLNIDAGGVQSRKIIDRLLAKENSPSPQDTQRKFPNIRVI

SEQ ID NO: 52133 - protein, 448 aa, Acinetobacter sp. ADP1
MQRDILSEINQNNMSRYQWFVIVVCVCLNIIDGFDVMVMAFTAPSVSAEWSLSGAQIGLLLSAGLFGMAAGSIFLAPLADKIGRRLLILICLAIAGISMLACGLVHSHSMLAALRFVTGIGVGGILASSNVLASEYANLRWRSLAVSLMSTGYGIGATLGGILSLLLIEHLGWRSIFLAGGVTTVVMLLVSLWLLPESLDYLLAKKPKQALEKINLTVQRIGLVRLNALPQHEKNTQQHSSDIAKLFQGKQGFQTLCLWFAFFLVMFGFYFVMSWTPKILIAMGMSPSQGVTTGILISIGGVFGAAIIGLLASRIKIFHALSLFLGLTAVCVWLFVAVSSQVSIALMVGLLLGTLINGCVAGLYSISPTIYDADIRSRGVGYAIGFGRIGAILSPTVAGIFLDKGLAPSTLYAYYGIVFILAIFLILSLSKAFYRQKEGLGSSIKTVA

SEQ ID NO: 52134 - protein, 655 aa, Wolinella succinogenes
MKVQYCDSLVIGGGLAGLRAAVATQQKGLSTIVLSLIPVKRSHSAAAQGGMQASLGNSKMSDGDNEDLHFMDTVKGSDWGCDQKVARMFVNTAPKAIRELAAWGVPWTRIHKGDRMAIINAQKTTITEEDFRHGLIHSRDFGGTKKWRTCYTADATGHTMLFAVANECLKLGVSIQDRKEAIALIHQDGKCYGAVVRDLVTGDIIAYVAKGTLIATGGYGRIYKNTTNAVVCEGTGTAIALETGIAQLGNMEAVQFHPTPLFPSGILLTEGCRGDGGILRDVDGHRFMPDYEPEKKELASRDVVSRRMIEHIRKGKGVQSPYGQHLWLDISILGRKHIETNLRDVQEICEYFAGIDPAEKWAPVLPMQHYSMGGIRTDYRGEAKLKGLFSAGEAACWDMHGFNRLGGNSVSEAVVAGMIVGEYFAEHCANTQVDLETKTLEKFVKGQEAYMKSLVESKGTEDVFKIKNRMKDVMDDNVGIFRDGPHLEKAVKELEELYKKSKNVGIKNKRLHANPELEEAYRVPMMLKVALCVAKGALDRTESRGAHNREDYPKRDDINWLNRTLASWPNPEQTLPTLEYEALDVNEMEIAPGYRGYGAKGNYIENPLSVKRQEEIDKIQSELEAAGKDRHAIQEALMPYELPAKYKARNERLGD

SEQ ID NO: 52135 - protein, 416 aa, Frankia sp. EAN1pec
MSRSVTLDRWRDRYAQRAQGMIASEVRALFAVASRPEIVSLAGGMPPVDVLPLEAVAATVSELVLSRGAVALQYGSAQGDPGLRARICDVMAMEGITDTHPDNVVVTAGSQQALDLLTRVFIDPGDVVVTEGPTYVTAINTFAAYQARIVHVPMDGDGLSPSALAETLSRLAAEGARVKLLYTVPTFQNPGGITLTPPRRAEVIELCRRAGVLVVEDNPYGLLSFTGEPVRAMRADAPDDVVYLGSFSKTLAPGLRVGWALAPPAVTARLVLAAESAILSQSMFTQLAVERYLATQPWAEQVKAFREMYRERRDAMLDALDEVMPPGASWTRPDGGFFVWLTLPDGVNTKAMLPRAIAARVAYVPGIGFYADGSGGTSMRLSYCYPPPERIREGVGRLGAVVRDELALRDTFGSRP

SEQ ID NO: 52136 - protein, 358 aa, Triticum aestivum
MAKFGEGDARWIVQERADGANVHNWHWAERDCLDWSRALLSKLLAGLPVLSGEGGLTLRTTTLDKLDGEAYVNIRKGKVIPGYELSLTLAWEADATTESGVVKVTGTAEVPYLADENADEDPELRITVRGDDGPLARRAKDAFIAHGKPLVITKIRDYVAAMANGGPAKDEIDSKKISTKAAPAAGGAAVAPAPSVKVTAAPVQAPAAKEKKANGKDKEGFKTIEMTEKFNCRSKDIYEILMDDNRWKGFTQSNARISKDVGGQFSLFDGSITGVNEELQEGKLIVQKWRFGSWADGVHSTVRLVFDEPESGVTTIKLKQTDVPEEDRYGNSTVVENTERGWKELIFQRIRAVFGFGV

SEQ ID NO: 52137 - protein, 140 aa, Silicibacter sp. TM1040
MALERTFSIIKPDATRRNLTGAINAKFEEAGLRIVAQKRIHMTKAQAGKFYAVHAERPFYDELCEFMSSAPVVVQVLEGEGAIAKNREIMGATNPADAAPGTIRAEFAESVGENSVHGSDAPETAAEEIAYFFSGLELVG

SEQ ID NO: 52138 - protein, 369 aa, Glycine max
MHETHHMGTLLVNYLWRIIEQVSKEMGVKMYSDMVTLQTMDNIFYEVQRQGRISFYLTQMGEEAVNIASAAALAPDDIILPQYREPGVLLWRGFTLQQFVHQCFGNTHDFGKGRQMPIHYGSNQHNYFTVSSPIATQLPQAVGAAYSLKMDGKSACAVTFCGDGATSEGDFHAAMNFAAVMEAPVVFICRNNGWAISTPVEDQFRSDGIVVKGKAYGIWSIRVDGNDALAVYSAVHTAREIAIKEKRPVLIEALTYRVGHHSTSDDSTKYRGTDEIEYWKMARNPVNRFKRWVERNGWWSDKDELELRSSVRKQLMHAIQVAEKAQKPPLQDLFNDVYDQIPSNLQEQERLIRKTIEKHPKDYPSDVPL

SEQ ID NO: 52139 - protein, 727 aa, uncultured archaeon GZfos37D1
MRRLLIISNRLPVSVERRKNEFRFSSSVGGLATGLNALHQRYESVWVGWPGIAINREETDYVESKLSEFNCYPVFLSQGEVEKYYYGFSNKTLWPLFHYFPQYAKYEHSEWSTYEHVNRKFCERVAEIAKPEDVIWIHDYHLMLLPGLIRERFPDATIGFFLHIPFPSADLFRLIPWRRRILEGVLGADLIGFHTYDYAHNFLSSVLRLLGYEHELGKFAIGDRIVQVDVHPMGIEVQKFVRATSRRGIKREVARLRSRFKNCKIIFSMDRLDYTKGIPERLYAFEHFLETHPEWHEKVVFILKIAPSRTKVGQYRVLKQEIDELVGRINGKYGTPEWVPISYFYRSLPFQTIVAFYLAADVALLTSMRDGMNLIAKEFVASRVDGKGVLILSEMAGAARELGEALVVNPNNKEEVAEALNEALRMPEEEQKSRNEEMQKRLRHYDVFHWGSGFIRRVLETKRLQEELNMKKLSEKIREELKNAYKAADKCLLLLDYDGTLVPFADKPERAKPDKELLDIFRALSKSPENTVVIISGRDKETLERWFGDTGVCLVAEHGVRLKEEEGEWKEIELLKEDWKEKIIHILDLFVDRAPGSFIEEKSFSLVWHYRKVDPELGELRAKELTDQLIDLTACTELQVMKGNKVVEVKDGRLNKGIAASHWLTKGFGFILAVGDDLTDEDMFKVLPEGAYSVKIGFTPSKARFYLGSPKEVRALLDEMELVEVYK

SEQ ID NO: 52140 - protein, 526 aa, Medicago truncatula
MDLYNIGWILSSVLSLFALYNLIFAGKKNYDVNEKVNQREDSVTSTDAGEIKSDKLNGDADVIIVGAGIAGAALAHTLGKDGRRVHIIERDLSEPDRIVGELLQPGGYLKLVELGLQDCVDNIDAQRVFGYALFKDGKHTRLSYPLEKFHSDVSGRSFHNGRFIQRMREKAASLPNVNMEQGTVISLLEEKGTIKGVQYKNKDGQALTAYAPLTIVCDGCFSNLRRSLCNPKVDNPSCFVGLILENCELPCANHGHVILGDPSPILFYPISSTEIRCLVDVPGTKVPSISNGDMTKYLKTTVAPQVPPELYDAFIAAVDKGNIRTMPNRSMPADPRPTPGAVLMGDAFNMRHPLTGGGMTVALSDIVVLRNLLKPMRDLNDAPTLCKYLESFYTLRKPVASTINTLAGALYKVFSASPDEARKEMRQACFDYLSLGGLFSEGPISLLSGLNPRPLSLVLHFFAVAVFGVGRLLLPFPSPKRVWIGARLLSGASGIILPIIKAEGIRQMFFPATVPAYYRAPPVNAF

SEQ ID NO: 52141 - protein, 519 aa, Medicago truncatula
MIDPYGFGWITCTLITLAALYNFLFSRKNHSDSTTTENITTATGECRSFNPNGDVDIIIVGAGVAGSALAYTLGKDGRRVLIIERDLNEPDRIVGELLQPGGYLKLIELGLDDCVEKIDAQKVFGYALFKDGKHTRLSYPLEKFHSDIAGRSFHNGRFILRMREKAASLPNVRLEQGTVTSLLEENGTIKGVQYKTKDAQEFSACAPLTIVCDGCFSNLRRSLCNPKVEVPSCFVGLVLENCELPCADHGHVILGDPSPVLFYPISSTEIRCLVDVPGQKVPSISNGEMAKYLKTVVAPQVPPELHAAFIAAVDKGHIRTMPNRSMPADPYPTPGALLMGDAFNMRHPLTGGGMTVALSDIVVLRNLLKPLRDLNDASSLCKYLESFYTLRKPVASTINTLAGALYKVFCASPDPARKEMRQACFDYLSLGGLFSEGPVSLLSGLNPCPLSLVLHFFAVAIYGVGRLLLPFPSPKRLWIGIRLIASASGIILPIIKAEGIRQMFFPATVPAYYRAPPDA

SEQ ID NO: 52142 - protein, 993 aa, Zea mays
MEQAPQTHGGGGLLACGVMEDVAVGDLDLMEELFMAAPGFDFSDFSQPGAGGESPGVCFSPLFDICSTTTTATPPPPPPSGDDNRDQPTPPRRGWVFQPRLEVDATVKERLRRALERIASLSQTQPGELLAQVWVPTVIGDRQVLTTCGQPFWLDCRNERLANYRTVSMKYQFSADETARTDLGMPGRVFVGRVPEWTPDVRYFSTEEYPRVHHAQYFDIRGSVALPIFEPRSRVCLGVVELVMTTEKVNYNAEIQNICSALKLCRLLCRYTLNLFDEMPLGKDVITTGHANPRSNQSFHLTLFGDVLVSVTDTSYRAIIPEIVDVLRTVCETHKLPLAQTWIPCICQAKRGSRHTDEKLKYCVSTLDEACYVRDLNVNGFHEACSEHHLFRGEGVVGRAFATNEPCFSEDITASSKIQYPLSHHAKLFSLRAAVAIRLRSISTGSLDYVLEFFLPVDCIEIEEQRAMLNSLSITIQQTCYTLRVVSLKELVDEGSIETSALTPPEYDKSMHENIDEVCSGIGVPARTASLETSEEVSSWIASLVCAQNKGVKEMDGDLPFGFSKQEDEGFSVTAGWHTSPVIEPEGSIFSGFKQHEEYKVKEVTCLRDPSSSNLEKTVEKRRTKMEKTVSLEELRKHFAGSLKEAAKNLGVCPTTLKRICRQHGINRWPSRKIKKVGHSLKKLQMVIDSVHGSEGTVQLSSLYENFTKTTWSERELQGDATYPLSEEKGPLEPSVPDRYCEGRFTSHTSGSNSLSPSCSQSSNSSHGCSSGSKSQQHVSAPQLAVKKEVFMEENQSSTLLKAASHAELQMLPEERLVTLPRSHSQVLLSEQKPVENITGMQMSKPDSLKIKAMYGEERCIFRLQPSWGFEKLKEEILKRFGIAREVYVDLKYLDDESEWVLLTCNADLLECIDVYKSSSTQTVRILVHSSDQIGEKVIVGVPCQLLGLVCMQFLKSQKLAKKPQAGESGINRSMPMPSCVVLVGTMKCLLTS

SEQ ID NO: 52143 - protein, 426 aa, Brucella suis 1330
MGYFPSWRLTSNAVVLPDERLPAAAAVPMGIQHLLAMSGSTIVAPLLMGFDPNVAVFFSGIGTLLFFLITAGRVPSYLGSSFAFIAVVIAATGYSGSGPNPNIAIALGGIIACGAFYSLIGLIVMFLGTGWVEKLMPPAVTGAIGVSIGLNLAPVAIGQLKGTGAHTSIALLTVLCMAMISAYGPRGTRRLSVLFALLFGYLLVLIAGNGLGIVPGIDFTAVKNAAWFGLPHFTTPAFNWQAVTLIAPVAIVLVAENLGHIKALGSITGRNMDGYIGRGFFSDGLATMISGAGGGTGVTTYAENIGVMAMTKVYSTLIFVIAAIMALILGMSPKFGAILQTIPAPVLAGLAVSVFGLIASAMARIWIVNKVDFADSRNLFTVGVALIFGAGDFTLNIGNFALGGIATSTLAALVLYQLLGIGRSDS

SEQ ID NO: 52144 - protein, 219 aa, Burkholderia pseudomallei K96243
MQDIIEGFLKFRRDAFAPRTALFKRLAASQQPRALFISCSDSRLVPELVTQREPGELFVIRNAGNIVPSFGPELGGVSASVEYAVAVLEVADVVVCGHSDCGAMRAIASCACLDHLPAVRSWLRYADAAKRVNEAREHAGEQARVDSMVRENVVAQLANLNTHPSVRLALEQGRLTLHGWVYDIETGSIDALDGATGRFVALAEHPRVHATPPRVQRAA

SEQ ID NO: 52145 - protein, 391 aa, Pseudomonas abietaniphila
MKDIVIVDAVRTPVGRFRGSLAGVRADHLGALVLNALVERNDLSPTVIDDVVFGCVTQIGEQSANIARTALLGAGWPVSIPGLTLDRKCGSGEAAVHVAAGAIASGMAEAVVAGGAENMSRVPMGSNRDLHGEAFGWMASERYELTSQGEAAERIVDKWKLSRDALDDYAFASHERAAKASDAGYFDSQLIPVPVESLREKTLTEPAVTLVADETIRRDTSREKLSTLKTSFRPENGRITAGNSSQISDGAAALLIMDAEAARRHGLRTRARIVAFATVGTDPTLMLTGPIEATAKVLRKAGLQLKDIDLFEVNEAFASVPLAWMHETGVSHERLNVNGGAIALGHPLGASGARLITTLLNELERRGARYGLQAICCAGGLGTATIIERLE

SEQ ID NO: 52146 - protein, 457 aa, Rhodobacter sphaeroides 2.4.1
MSADPPRTAGVAEDRLAAFLADETARFERENPRSKEALQRGAQSYLGGVPMHWMKDWPSPFPLVAAEAQGARLTDLDGHRLDDFCLGDTGSMFGHSPAPVARAIRRQARQGLTYMLPTEATFEAGQLLNRTFGDFRWQVALTATDANRFALRVARAVTGRRKVLVFNGCYHGTVDDTMVMLENGRTRARPGLVGMVADLASKAVAVEFNDVAGVEAALATGEIAAILTEPVMTNSCMVLPEAGFHDALRTLSRRYGAVLILDETHTLSSGLGGYGRVHSLSPDILVVGKCVAGGTPTAVWGLTPDLGARFAAYNATRPAGHSGMGTTLSANPMQFACLCATLSEVMTPEAYAHMERGAKRLAKGLAAAIARVGAPWHVVRVGARVEFICAPGPLRNGTEAAAAHQPRLEGAVHLGLLNRGSLIAPFHNMMLVSPMTRTRQIDRLIAAFDAILTDLFA

SEQ ID NO: 52147 - protein, 340 aa, Campylobacter jejuni RM1221
MAITVYYDKDCDLNLIKSKKVAIIGFGSQGHAHAMNLRDNGVNVTIGLREGSVSAVKAKNAGFEVMSVSEASKIADVIMILAPDEIQADIFNVEIKPNLSEGKAIAFAHGFNIHYGQIVVPKGVDVIMIAPKAPGHTVRNEFTLGGGTPCLIAIHQDESKNAKNLALSYASAIGGGRTGIIETTFKAETETDLFGEQAVLCGGLSALIQAGFETLVEAGYEPEMAYFECLHEMKLIVDLIYQGGIADMRYSISNTAEYGDYITGPKIITEETKKAMKGVLKDIQNGVFAKDFILERRAGFARMHAERKNMNDSLIEKTGRNLRAMMPWISAKKLVDKDKN

SEQ ID NO: 52148 - protein, 530 aa, Oryza sativa
  misc_feature (355)..(355): Xaa can be any naturally occurring amino acid
  unsure (1)..(530): unsure at all Xaa locations
MAAPAPKQEELQPHAVKDQLPAISYCLTSPPPWPEAILLGFQHYLVMLGTTVIIPTALVPQMGGGNEEKARVIQTLLFVAGINTLIQSFLGTRLPAVIGGSYTFVAPTISIILAGRYNGIADPHEKFVRIMRGTQGALIVASTLQIIMGFSGLWRIVVRLLSPLSAAPLVALVGFGLYELGFPSVAKCVEIGLPQIILLVALSQYIPKLVPLLGTAFERFAIIMSVALVWLYAFFLTVGGAYKNAAPKTQFHCRTDRSGLVGGAPWISVPYPFQWGAPTFDAGEAFAMMAASFVALVESTGAFIAVSRYASATPCPPSVMSRGIGWQGVGILLGGLFGTANGSSVSVENAGLLGXLTRVGSRRVVQNSAGFMIFFFNLGKFGAVFASIPGPIIAAIYCLLFAYVGMAGVGFLQFCNLNSFRTKFIVGFSVFMGLSVPQYFNEYTSVAGYGPVHTHARWFNDMINVVFSSKAFVGGAVAYLLDNTLQRHDSTARKDRGHHFWDRFRSFRTDPRSEEFYSLPFNLNKFFPSF

SEQ ID NO: 52149 - protein, 675 aa, Burkholderia pseudomallei K96243
MTTSSPASTTLMANAIRALAMDAVQQANSGHPGMPMGMAEIGVALWSRHLKHNPTNPHWADRDRFVLSNGHGSMLLYSLLHLTGYDLPIEELKNFRQLHSKTPGHPEYGITPGVETTTGPLGQGLANAVGMALGEALLAAEFNRDDAKIVDHHTYVFVGDGCLMEGISHEACSLAGTLKLNKLIAFYDDNGISIDGDVVNWFHDDTPKRFEAYGWNVIPNVNGHDVDAVDAAIAKAKSADKPTLICCKTVIGKGAATKAGGHDVHGAALGAEEIAKTRDALGWKWAPFVIPQEVYAAWDAKEAGKRREGDWNAAFAQYRAKYPAEAAEFERRMAGKLPADWAEKAAAIVAGANERGETVATRKASQQTIEGLAAVLPELLGGSADLTGSNLTNWKASKAVRANAHGAGIQWGNHINYGVREFGMSAAINGLVLHGGYKPFGGTFLTFSDYSRNALRVAALMKVPSIFVFTHDSIGLGEDGPTHQSVEHVASLRLIPNLDVWRPADTVETAVAWTHAVSHQHPSCLVFSRQNLAFNARTDAQLANIEKGGYVLRDWDEEIVARKIILIATGSEVELAMKAVEPLAQQGIAARVVSMPSTDVFDRQDAEYRERVLPHGVRRVAIEAGVTDFWRKYVGLEGGVVGIDTFGESAPAGVLFKHFGFTIEHVVETAKAVLA

SEQ ID NO: 52150 - protein, 146 aa, Brucella suis 1330
MKYQKSAEAIAKLSAEQYRVTQENGTERPGTGEYLYNKEPGIYVDIVSGEPLFASSDKYESHCGWPSFTKPIERANVTELTDMSHGMVRTEVRSAHGDSHLGHVFPDGPVDRGGLRYCINSASLRFVPKDRMEAEGYGDYLDQVEG

SEQ ID NO: 52151 - protein, 85 aa, Brassica napus
MAEPAEHRPAEEEEAAAAGEDEDTGAQVAPIVKLEEVAVTTGEEDEDALLDMKAKLYRFDKEGNQWKERGTGTVKLLKHKDTAKV

SEQ ID NO: 52152 - protein, 274 aa, Oceanobacillus iheyensis HTE831
MEYVTLNNGLKMPQLGFGVWKVPNEEVVSPVEHALKVGYRSIDTAKVYGNEVGVGEAISNSGIPREQLFITTKVWNSDHGYDNTLKAFDESLERLGLDYVDLYLIHWPTPEFDQYVETYKALETLYKDGKVKAIGVCNFDIEYLERILNECEIVPVLNQVECHPYLQQKELRDFCEKHNIYLESYSPLMNGKEVLQSEELQNLAERKGKTVAQTILRWHLQSGMIVIPKSVTPNRIEENLDVFDFELTDTEMQEINELDRNLRSGAVPSEMNVR

SEQ ID NO: 52153 - protein, 354 aa, Bacillus cereus G9241
MKSMFNKIFLIVALIGVPLSVLGKTLHWPQTIMFAVYCITIIALAGFMGRATESLAIVSGPRIGGLLNATFGNAVELIISIFALQAGLIEVVLASLTGSVLGNLLLVGGLSFFVGGLKYKRQSFNVYDARHNSALLIFAVVVAFVIPEIFSMKMDAGKTYQLSIGVSIIMIIMYLAALLFKLVTHRGVYQHKSDEVAHEEEPEWSKGKALLILAIATIAVAYVSEALVHTFETVAKSFGWSELFIGVIIVAIVGNAAEHASAIIMAYKNKVNIAVEIAVGSTLQIAMFVAPVLVLLSMFFAQRMPLVFTIPELVSMITAVFLTIAISNDGDTNWFEGGTLLAAYVIMGIGFYLL

SEQ ID NO: 52154 - protein, 227 aa, Yarrowia lipolytica CLIB122
MEELRALIKAQPRPLSPRIVHDLVQQALTSRHIFSFGELLDLDEISNGRQDDPWIQTLRIFAYGTWSDYVAQKEPANLPDLTEKQATKLRQLSIISLITDDPSVQQEGILKYHDIEKAVGLGEESQLEDLAIDCIYRGLFQGRINSQLHLVEECRLGNVERDVSPAQAVEIEAALTELLNRSQNVLDELEESIKQVEHDAHERNLSVQKYNQLLKTKPKPAVSKTKS

SEQ ID NO: 52155 - protein, 380 aa, Zea mays
SESESEAASRRQGEMGKGAQGSDAAAAGGEVEENMAAWLVAKNTLKIMPFKLPPVGPYDVRVRMKAVGICGSDVHYLREMRIAHFVVKEPMVIGHECAGVVEEVGAGVTHLSVGDRVALEPGVSCWRCRHCKGGRYNLCEDMKFFATPPVHGSLANQVVHPADLCFKLPDGVSLEEGAMCEPLSVGVHACRRAGVGPETGVLVVGAGPIGLVSLLAARAFGAPRVVVVDVDEHRLAVARSLGADAAVRVSPRAEDLADEVERIRAAMGSDIDVSLDCAGFSKTMSTALEATRPGGKVCLVGMGHNEMTLPLTAAAAREVDVVGVFRYKDTWPLCIDFLRSGKVDVKPLITHRFGFSQRDVEEAFEVSARGRDAIKVMFNL

SEQ ID NO: 52156 - protein, 195 aa, Morus alba
GFFEVTHDISNLTCADFLRAPGVQTPVIVRFSTVIHERGSPETLRDPRGFAVKFYTREGNFDLVGNNFPVFFIRDGIKFPDMVHALKPNPKSHIQEFWRILDFFSHHPESLHMFTFLFDDIGVPQDYRHMDGSGVNTYTLIDKAGKAHYVKFHWKPTCGVKSLLEDEAIRVGGANHSHATQDLYDSIAAGNYPEW

SEQ ID NO: 52157 - protein, 501 aa, uncultured archaeon GZfos37D1
MIRHITSEEMAALDENCKFYGLIPLQLMENAGANVANEIKKRFSGEGTSVTVVAGKGNNGGDAFAAARHLHGFDVKILLLGRSKDLRTEETSRNMRILKENGFDIVEITDSSELKTLYRSEVIIDAIFGTGISGKIREPEATAINLINDANAFVVAVDVPSGLDPDTGEAEKAVRADLTVTFHSAKRGLLNAKEYVGELMVADIGIPDGMERLTGPGDVRIVAKRKASSHKGDNGRVLIVGGGPFFGAPTLAALAALHAGADWVTIAAPKSVSSIIASISPNLIVQPLSSEILVEADVPVVSNLVNRHDVLVIGMGLGAEEATKKAARKIIEDAKDVVVDADGFYGLQLPLKDKHVIVTPHAGEFSKFGAMEGRVEVPPEANVGERIEFVKKVSKLNKVVTLMKGPTDIISDGVRVKLTRKGNAGMTVGGTGDALAGIAGAFFAIVSDPFKAATAAAFVNGTAGDLAFEEKGYGLLATDVVENIPKVMKDLDLFPLAKDSA

SEQ ID NO: 52158 - protein, 491 aa, Ralstonia eutropha JMP134
MSLTLANAALLRSQNFINQQWRDAGLGRRLAVANPATGEVFAHVPDSDDDDAGRAADAAAEAFPAWSARPARERAQLIKRWHALILANQEDLARIISTEQGKPLKEARGEVLYGASYVEWFAEEATRICGDIVAEAVPGRKLLVLKEPVGVVAAITPWNFPLAMIARKIAPALAAGCTVVAKPAEDTPLTALALVWLAEQAGLPAGVLNIVTASRESTPNVVDAWLADSRVRKITFTGSTPVGKHLARESAGTLKKLSLELGGNAPFIVFEDADLDAAVDGLMASKFRNGGQTCVCPNRVYVHESVHDDFVERLARRVGALHVAPATDENAQIGPMINARAVDKIARHVEDAVAKGARVVTGGRRVRTADGPHYYAPTVLIDATPAMELACEETFGPVAPVFRFRDESEVIRDANDTPFGLAAYFYSNDVRRIWRVAQALETGMVGINEGAIAAEAAPFGGVKESGYGREGSRHGLDDYMHTKYLCQGQLG

SEQ ID NO: 52159 - protein, 623 aa, Xylella fastidiosa Ann-1
MRSPIMSNERTAQQSDIKQLISKGLEQGYLTYAEVNDHLPEDLVDPDQIEDIIGMINGMGIEVHEVAPDAETLLLNEGNTGNREVDDTAAEEAAAALSALDTEAGRTTDPVRMYMREMGTVELLTREGEIAIAKRIEEGLSEVQAALGAFPLSTELLLSEYELHKEGKRRLTEVVVGFNDLIEEDNSVTSAVDVTDESIVEVDEEDDDSVGNDEDAPMIGPDPAEVASRIESLSTEYAKFKKLYAKHGPEHKAVIKVREDVAAIFVTFKLSLPLTDLLVQQLQNTVNSVKDHERKVLHLATNVAKMPRKDFIRSWENNQTNLEWVEDAIKRKQKWSSALRDIKDQITAEQQASIDLEKANSLTLADIKEINRMMVYGEAKASKAKKEMVEANLRLVISIAKKYTNRGLQFLDLIQEGNIGLMKAVCKFEHRRGFKFSTYATWWIRQAITRSIADQARTIRIPVHMIETINKLNRISRQMLQQFGREATPEELAKEMDMPEDKIRKVMKIAKEPISMETPIGDDEDSHLGDFIEDPNVESPVDTTTNVNLSETVREVLAGLTPREAKVLRMRFGIDMNTDHTLEEVGKQFDVTRERIRQIEAKALRKLRHPSRSEQLRSFLDID

SEQ ID NO: 52160 - protein, 695 aa, Saccharomyces cerevisiae
MAGILSKTLSEVHPSLRTNGMGIGNTHRRISLGFLPPNKKNPLVRKFRARTRNIDQRSFRSLTDDFGSNVHEPNPYLGNIDEEPDLYYHDEEDGELSRTISLPSRVSETPELSPQDVDWILHEHERRYSSVCNSDNEEASQSNTPDRIQEYSGRELEYDEFMNRLQAQKQKLTRSAVTDAKGTSHHRRPSFVSVTSRGSVPTIYQEIDENDSEALAELAHSHVTFKSEARVLASYSFPLIFTFLLEQIFPMVCSLTVGHLGKNELAAVSLASMTSNITLAIFEGIATSLDTLCPQAYGSGRFYSVGVHLQRCIAFSLVIYIPFAVMWWYSEPLLSYIIPEKELINLTSRFLRVLILGAPAYIFFENLKRFLQAQGIFDAGIYVLTICAPLNVLVSYTLVWNKYIGVGFIGAAIAVVLNFWLMFFLLLFYALYIDGRKCWGGFSRKAFTHWNDLGHLAFSGIIMLEAEELSYELLTLFSAYYGVSYLAAQSAVSTMAALLYMIPFAIGISTSTRIANFIGAKRTDFAHISSQVGLSFSFIAGFINCCILVFGRNLIANIYSKDPEVIKLIAQVLPLVGIVQNFDSLNAVAGSCLRGQGMQSLGSIVNLMAYYLFGIPLALILSWFFDMKLYGLWIGIGSAMLLIGLVEAYYVLFPDWDKIMTYAEILKETEDDEVDSDEYLTDSDDPDENTALLGA

SEQ ID NO: 52161 - protein, 388 aa, Rhodospirillum rubrum
MSLLDAFKPLHAGMIDWRHDIHRHPELGYQETRTAAKVAGLLRGFGCDAVVEQIGGTGVVGVLRQGDGPMIGLRADMDALPIPERNDFDHQSVHPGVMHACGHDGHTAMLLGAARHLAATRRFQGSVVFIFQPAEEGLAGARAMIEDGLFERWPVEAVYGLHNLPGLPAGSISVSPGPQLAAADKLVIEITGRGAHAAAPELARDPVLAGAAAVQALQQIVSRNVSPAETAVVSVTCFNAGETFNVLPDGATLKGTVRYFSSETGDLVRNRIAQVLEGIALAHDVSITLDLQRGYPATVNSAPQADFARGVARALLGEDLAPPQEPRMIAEDFSLMLQVKPGAFGFIGNGQSPSLHNPRYEFNDAILPIGAAYFCALAETALRRPPHG

SEQ ID NO: 52162 - protein, 242 aa, Corylus avellana
MEFQNQSMSVSPQRKLGRGKIEIKRIENTTNRQVTFCKRRNGLLKKAYELSVLCDAEIALIVFSSRGRLYEYANNSSVKTTIERYKKACADSSNSGSVSEANTQFYQQEAAKLRGQIRSVQDSNRHMLGEALSELNFKELKNLEKNLEKGINRIRSKKNELLLAEIEYMHKREVDLHNNNQFLRAKIAENERNQQNLNVMPGGGNYELMQSQSFDSRNYFQVDALQPNHHYPRQDQMALQLV

SEQ ID NO: 52163 - protein, 193 aa, Arabidopsis thaliana
  misc_feature (60)..(60): Xaa can be any naturally occurring amino acid
  misc_feature (156)..(156): Xaa can be any naturally occurring amino acid
  unsure (1)..(193): unsure at all Xaa locations
PRVREVVEASNGIQAWKVLEDLNNHIDIVLTEVIMPYLSGIGLLCKILNHKSRRNIPVIXSGSGSESGTHQTQKSVKSKSIKKSDQDSGSSDENENGSIGLNASDGSSDGSGAQSSWTKKAVDVDDSPRAVSLWDRVDSTCAQVVHSNPEFPSNQXLVAPPAEKETQEHDDKFEDVTMGRDLEISIRRNWICP

SEQ ID NO: 52164 - protein, 401 aa, Xylella fastidiosa Ann-1
MTRPDLNERILSLRKLRLAQCRTRTRRTIERRNGVRLEINGSWLVEFCSNDYLGLAQHFEIIAALQDAAARNGIGATASHLICGHHAIHKALEYELAEWLGYPRALLFGSGFTANLAVQQALLTKENDICVQDRLNHASLIDATRLAGCRLRRYPHLDVDGAAHQLKNAPEGAAMLATDGIFSMDGDIAPLRALSLVARTQQALMYVDDAHGIGVTGPQGRGCIAAAWLSVEEVPLQLVTLSKALGGYGAAVLGSATLIQHLAETARPYIYTTALPPAQAAAALTAIRIARRDEWRRQRLQELVERFRENSRRHGLEIMDSETPIQPLQCGDETTTMAMSAALEREGFLVNAIRPPTVPEGKSRLRVTLSALHTTEQIDTLVQALARSRDALATEAAPVQV

SEQ ID NO: 52165 - protein, 268 aa, Glycine max
MAESANSIHNSGQKKLAGKVAIITGGASGIGEETARLFAHHGARMVVIADIQDDLGIQVAASIGSHRCSYVRCDVTDEDQVKNLVDSTVNAHGQLDIMFSNAGILSPSDQTILDLDFSAYDRLLAVNARGTAACVKHAARSMVERRVRGSIVCTASVSASHGGLRRTDYVMSKHAVKGLMRAASAQLGAHGVRVNCVSPSGLTTPLTRAAHAAMETKELQKQYAQSSRLKGVFLTPKHVADAVLFLACGDSEFVTGHDLVVDGCFDGV

SEQ ID NO: 52166 - protein, 537 aa, Thermoanaerobacter tengcongensis MB4
MAKYIFVTGGVVSSLGKGITAASLGRLLKSRGLSVAMQKFDPYINIDPGTMSPYQHGEVFVTEDGAETDLDLGHYERFIDVNLTKNSNVTAGKIYWSVITKERKGDYLGATVQVIPHITDEIKERVYRVAKEKNVDVVITEIGGTVGDIESLPFLEAIRQVAIEQGRENVMFIHVTLVPHLGNTGELKTKPTQHSVKELRSIGIQPDMIVCRTELPLPQELREKIALFCNVSVEAVIENRDVESIYQVPLELERQKVDEYVIKRLNLPLGQSDLKEWREYVEKEKNPEHQVEVALVGKYVDLHDAYISVVEALKHAGVYHKTAVNIRWVNAEKVNDKTVDELLKGADGILVPGGFGDRGIEGKIRAIQYARENKIPYLGLCLGMQCAVIEFARNVAGLKGANSTEFDPNTPHPVIDLMPEQKDIDEKGGTMRLGVYPCKVIEGTKAYEVYKDELVYERHRHRYEFNNQYRELLTSKGLVISGLSPDERLVEIIELKDHPYFVATQFHPEFKSRPLNPHPLFRDFVKAMLNLKINNAE

SEQ ID NO: 52167 - protein, 404 aa, ASPERGILLUS NIDULANS FGSC A4
MASQVQPGQKPKVQPCRYKTGKTLGAGSYSVVKECVHIDTGQYYAAKVINKRLMVGREHMVRNEIAILKQVSTGHQNILTLVDYFETMNNLYLVTDLALGGELFDRICRKGSYYESDAADLVRAILSAVAYLHDHGIVHRDLKPENLLFRTPEDNADLLIADFGLSRIMDEEQLHVLTTTCGTPGYMAPEIFDKSGHGKPVDIWAIGVITYFMLCGYTPFDRETNLEEVQAIATANFSFTPVEYWRGVSQEARDFIKRCLTVNPKKRMTAHQALQHPWINPPYDTTDDLGSGEDLLPNIKKNFNARRTLHKAIDTVRAINKLRENGGLMMDGIMSVDPKPEHVNGSEVVEDRTTPRERENEDAMEIDSRSNARGQTEQQIREQERKVKETVAGLWSRTAPRSER

SEQ ID NO: 52168 - protein, 291 aa, Yersinia pestis KIM
MERYQQLFKQLAAKKEGAFVPFVQLGDPSPAMSLNIIDTLIAAGADALELGIPFSDPLADGPTIQNAALRAFAAGVTPGICFEILAEIRQKHPTIPIGLLMYANLVFHNGIDHFYQRCAEVGVDSVLIADVPFEESAPFRAAALRHGIAPIFICPPNADDDLLREIASHGRGYTYLLSRAGVTGAENHGQLPLNHLVDKLREYNAAPALQGFGISEPAQVKASLAAGAAGAISGSAIVKIIEKNVAQPVEMLVHANPLRHRDESGNPQLVIIYNWLLLRVSYRLELITIYR

SEQ ID NO: 52169 - protein, 368 aa, Campylobacter jejuni
SGVIISKDGYIVTNNHVVDDADTITVNLPGSDIEYKAKLIGKDPKTDLAVIKIEANNLSAITFTNSDDLMEGDVVFALGNPFGVGFSVTSGIISALNKDNIGLNQYENFIQTDASINPGNSGGALVDSRGYLVGINSAILSRGGGNNGIGFAIPSNMVKDIAKKLIEKGKIDRGFLGVTILALQGNTKKAYKNQEGALITDVQKGSSADEAGLKRGDLVTKVNDKVIKSPIDLKNYIGTLEIGQKISLSYERDGENKQASFILKGEKENPKGVQSDLIDGLSLRNLDPRLKDRLQIPKDVNGVLVHSVKEKSKGKNSGFQEGDIIIGVGQSEIKNLKDLEQALKQVNKKEFTKVCVYRNGFATLLVLK

SEQ ID NO: 52170 - protein, 312 aa, Triticum aestivum
  misc_feature (223)..(224): Xaa can be any naturally occurring amino acid
  misc_feature (249)..(249): Xaa can be any naturally occurring amino acid
  misc_feature (281)..(281): Xaa can be any naturally occurring amino acid
  unsure (1)..(312): unsure at all Xaa locations
MAVSSVLAILLDASCALASATFDKEFDITWGDGRGKIMNNGQLLTLGLDKVSGSGFQSKHEYLYGKIDMQLKLVPGNSAGTVTAYYLSSQGPTHDEIDFEFLGNVTGEPYTLHTNVFTQGQGQREQQFRLWFDPTNDFHTYSILWNPKHIIFMVDDMPIRDFRNLEGKGIAFPKNQPMRLYSSLWNADDWATQGGRVKTDWSHAPFSASYRGFKADACVVTAXXRPRCGASVGTEVAPGTGAAGEWYNXELDLTRQQRMRWVQSNYMIYNYCTDPQRFAQXRPAECSCSHACRSPEKDGRNREDGCLYNRYP

SEQ ID NO: 52171 - protein, 361 aa, Thermoanaerobacter tengcongensis MB4
MEDMLLMTPGPTMVPEEVKKVAGMQPFHHRTEEFYQLFSKLNENLKKIFQTKNEVITLTSSGTGGMEAAVANLFSAGDKVLVASIGYFGERFYDIARAYGLDAEIYDFGWGNAVDLDILEDKLKKGNYKALLVTHNETSTGVTNNIENIAKIANRYNVPVIVDAVSSLGGIPLKMDEWGIDAVITCSQKCLMSPPGLSFIALSDRAWEMTKTSNLPKYYFDLRKAREGVLKPKPDTPATPAVSTIMAVAKATDMLLEKGLDNVYKKQSEYGKKVRKYVKELGLDLLPSEEVASNLITAIKVPERYKASDIINYMKEKHRVLITGGQGPLKGKIIRIGHMGYLTDEMLDKALYALKDAISSL

SEQ ID NO: 52172 - protein, 756 aa, Legionella pneumophila subsp. pneumophila str. Philadelphia 1
MVIAQFKQGVVMLDRASVVDEQFLKRVLQGDFPQLRSSMSPDTAELDKKTAIEFFDSQIKSRLLDIIARQLKEKGLSFYTIGSSGHEGNAVLGQVFRASDMAFLHYRSGAFFLQRAKQLPGIDGVKDILLSLVAAASDPISGGRHKVFGSVPLNIPPQTSTIASHLPKALGAALSITRARELGLPSKLTPDSVILCSFGDASTNHATSQATLNACSWITQQNYPLPIVFICEDNGIGISVPTPSSWIKSSVSSRPGIHYIECDGLNIADVFAKAQEADYLARVKKQPVFLHMRCVRLLGHAGSDIESQYNTQEEIEQREANDPLLHTAGILYREGWMSLQAMVELYQDNRALIEAKALEAIREPRMSSAEEIMASIVPRIDKKQKYSLPDDNRRAQVFAGAYNQLTLKRNLCQQINFALTDLMMQYPNMLIFGEDVGKKGGVYRVTADLQARFGQRRVFDTLLDETTIIGTAIGLAHNGFIPVPEIQFLAYLHNAEDQLRGEASTLSFFSSGQYQNPMVLRIASLAYQKGFGGHFHNDNSIAVLRDLPGVIVACPSNGPDAAKMLRTCMRLAYEEGRVVVFLEPIALYMTKDLYSPGDNGWLFEYPSPDEMISQGEVGVYGEGDTVILTYANGYYLSRQAEKVLREAHNISVKIIDLRWLSPLPKDAILKEIAKAKRILIVDEGRQSGSISEGLMTLLMEEASPRLKIKRITGKDCFIPLGTAWQYLLPSQESIIDAVIALQSDKREKESGRLVVS

SEQ ID NO: 52173 - protein, 246 aa, Brassica napus
MDNNNQQPPPPPTSVCPPASAATAIPPPPPSGSTPIIPGGGGASYHHLLQQQLQQLQMFWSYQRKEIEQVNDFKNHQLPLARIKKIMKADEDVRMISAEAPILFAKACELFILELTIRSWLHAEENKRRTLQKNDIAAAITRTDIFDFLVDIVPREEIKEEEEPPLGSMVAAPPLSGVPYYSPPMAHPAVPGGMMIGRPAMDPSGVYAQPPSQAWQSVWQNSAPGDDVSYGSGGSTGAHGNLDTQG

SEQ ID NO: 52174 - protein, 165 aa, Campylobacter jejuni RM1221
MKNIILGGGCFWCIEAVFERLKGVINTEVGYSGGKPNPSYESVCNGDGNIEVVKINYDEKQISLLEILILFFKIHDPTSIDKQGEDIGIQYRSIIFYENEEDKILAQNFIEEQQKIFSKKIVTKISRLQTYYKAENYHQHYFINNPDQGYCQAVIAPKLQKIQSD

SEQ ID NO: 52175 - protein, 587 aa, Rhodobacter sphaeroides 2.4.1
MPPRDRDRPSIVSAKAVLSMSLPNHAPVPELYVSYDSAQKLKADAGSLPSWDLTQRQICDLELLMNGGFHPLKGFLTEADYDGVVENMRLADGRLWPMPVTLDVSEKFAEGVEPGQDIALRDAEGVILAILSVTDKWVPNKDREAEKVFGANDLAHPAVNYLHHTAGKVYLGGPITGIQPPVHYDFKMRRDTPNELRAFFRKMGWTRVVAFQTRNPLHRAHQELTFRAAREAQANLLIHPVVGMTKPGDIDHFTRVRCYEAVLDQYPSSTTTLSLLNLAMRMGGPREAVWHGLIRRNHGCTHMIVGRDHAGPGKNSEGKDFYGPYDAQELFKAHADEIGVEMVDFKQMVYVQEKAQYFPVDEVPEGSTVLDISGTELRRRLREGLEIPEWFSFPDVVSELRRTSPARSKQGFTVFFTGLSGSGKSTIANALMVKLMEMGGRPVTLLDGDVVRKHLSSELGFSKEHRDINIKRIGYVASEITKNGGIAICAPIAPYTATRRAVREMIEAFGAFIEVHVATPIEECERRDRKGLYKLAREGKIKEFTGISDPYEVPAKAELVVDTANVSVDHCAHQVILKLEQMGLIRA

SEQ ID NO: 52176 - protein, 146 aa, Oryza sativa (japonica cultivar-group)
MARLHLVVVAMAALFAAAAVAQGPSASPTPAPKAQPPVATPPTRPPAVAPVSPPAAQPPVTTPPPVSAPAPVPAPSAAATPSPQASAPTAEPPVLSPPAPAPGSISQSPTEAPTSPPPPSAASGVSPSAAAVVAAWAAVAAVAAFY

SEQ ID NO: 52177 - protein, 234 aa, Asparagus virgatus
MGRGKIEIKRIENTTNRQVTFCKRRNGLLKKAYELSVLCDAEVALIVFSSRGRLYEYANNSIKSTIERYKKACADSSNSNAVIEVNSQQYYQQEAAKLRHQIQILQNANRHLMGDSLSSLTVKELKQLENRLERGITRIRSKKHELLFAEIEYMQKREAELQNDNMYLRAKISENERAHQVSVVQPGPEFDTLPTFDSRNYYNVHMLEAAPHYSHHQDQTALHLGYENKADPAA

SEQ ID NO: 52178 - protein, 320 aa, Synechococcus elongatus PCC 6301
MSTSSAQYSPDLVRAYLQEIGRVRLLTAEEELCFGRQVQRLMMLLDAQTELRDRLGHEPSKEEWAAAVDLNLEDLDRQIEQGQRAKRKMIEANLRLVVSIAKKYQKRHMEFLDLIQEGTLGLERGFEKFDPSKGYKFSTYAYWWIRQAITRAIAQQSRTIRLPIHITEKLNKLKKTQRELSQQLGRSATASELAEVLELPLEQVREYIQMNRQPVSLDVKVGDSQDTELQELLEDEQSSPSDYVEQESLRRDLRNLMAELTPQQQAVIALRYGLDEGDSLSLAKVGERLNISRERVRKLERQAMDHLRRRSRLLAEYAAS

SEQ ID NO: 52179 - protein, 103 aa, Glycine max
  misc_feature (53)..(53): Xaa can be any naturally occurring amino acid
  misc_feature (88)..(88): Xaa can be any naturally occurring amino acid
  misc_feature (95)..(95): Xaa can be any naturally occurring amino acid
  unsure (1)..(103): unsure at all Xaa locations
MEFPNEAIPEGCSQKKTGRGKIEIKRIENTTNRQVTFCKRRNGLLKKAYELSXLCDAEVALVVFSSRGRLYEYANNSVRGTIDRYKKXCAASTNXESVSEANT

SEQ ID NO: 52180 - protein, 328 aa, Escherichia coli CFT073
MTRTNLITGFLGSGKTTSILHLLAHKDPNEKWAVLVNEFGEVGIDGALLADSGALLKEIPGGCMCCVNGLPMQVGLNTLLRQGKPDRLLIEPTGLGHPKQLLDLLTAPVYEPWIDLRATLCILDPRLLLDEKSASNENFRDQLAAADIIVANKSDRATPESEQALERWWQQNGGDRQLIHSEHGKIDGHLLDLPRRNLAELPASAAHSHQHSVKKGLAALSLPEHQRWRRSLNSGQGHQACGWIFDADTVFDTIGILEWARLAPVERVKGVLRIPEGLVRINRQGDDLHIETQNVAPPDSRIELISSSEADWNALQSALLKLRLATTA

SEQ ID NO: 52181 - protein, 161 aa, Triticum aestivum
  misc_feature (25)..(25): Xaa can be any naturally occurring amino acid
  unsure (1)..(161): unsure at all Xaa locations
PCEAFSSGGRIRCIQVWPIEGIKKXFETLSYLPPLSTEALLKQVDYLIRSKWVPCLEFSKVGFIFREHNASPGYYDGRYWTMWKLPMFGCTDATQVINEVEEVKKEYPDAYVRIIGFDNMRQVQCVSSPAFKPPGCEASGKTSPPPPRQAIYKVPLQFCQL

SEQ ID NO: 52182 - protein, 142 aa, Pseudomonas putida KT2440
MWGSWSAYEPMPGLLRLLEHAQAHGIGMCVVTNAPRLNAEHMLNAMGLGQHFEHVLVAEELARPKPDPLPYLTGLQRLGVEAGQALAFEDSLPGTAAASGAGIFTVGVATTQTPERLLAAGARLVVDDFNDAALWALIERMA

SEQ ID NO: 52183 - protein, 613 aa, Neurospora crassa
MDNTNRPHLNLGTNDTRMAPNDRTYPTTPSTFPQPVFPGQQAGGSQQYNQAYAQSGNYYQQNQYASHYAPPGAADYGFVQAHSNIDGTSNDPNTGLAHQFAHQNIGSAGRASPYGSRGPSPAQRPRTSGNSGQQQTYGNYLSAPMPSNTQTEFAPAPERNPDKYGPNANNNQKKCSQLASDFFKDSVKRARERNQRQSEMEQKLGETNDARRRESIWSTAGRKEGQYLRFLRTKDKPENYQTIKIIGKGAFGEVKLVQKKADGKVYAMKSLIKTEMFKKDQLAHVRAERDILAESDSPWVVKLYTTFQDANFLYMLMEFLPGGDLMTMLIKYEIFSEDITRFYIAEIVLAIDAVHKLGFIHRGGHVKLTDFGLSTGFHKLHDNNYYTQLLQGKSNKPRDNRNSVAIDQINLTVSNRAQINDWRRSRRLMAYSTVGTPDYIAPEIFTGHGYSFDCDWWSLGTIMFECLVGWPPFCAEDSHDTYRKIVNWRHSLYFPDDITLGVDAENLIRSLICNTENRLGRGGAHEIKSHAFFRGVEFDSLRRIRAPFEPRLTSAIDTTYFPTDEIDQTDNATLLKAQQAARGAAAPAQQEESPELSLPFIGYTFKRFDNNFR

SEQ ID NO: 52184 - protein, 148 aa, Chara corallina
MSDLTDEQISEFKEAFSLFDKDGDGSITTKELGTVMRSLGQNPTEAELQDMINEVDVDGNGTIDFHEFLNLMARKMKDTDSEEELKEAFKVFDKDQNGYISAAELRHVMTNLGEKLTDEEVDEMIREADVDGDGQVNYEEFVKMMMAK

SEQ ID NO: 52185 - protein, 641 aa, Yarrowia lipolytica CLIB122
MWAPIKHALYAPKPEPGSSPTVVENPSTFQKIFNPPVKKDENAIDENAAPNGSQEMAKITSLWNRHDLWMAWGSMLLIAVALALQGRTFKVYSTFATSEFEELSLLSSLAVTQAVINVAATTVFAKLADVLGRFESFLLSVVFFTIGFIMLAVSPNIGTYFAAHIFYVSGSQGITFLQQVFAADTSSLRNRLFFVVLPNVCYIFVPWCAAPITNAIIKHSTWRWGYGMWCIIVPIVSIPVLTILFRLKMKAKSLNMAGGKSLQVRDAKETLRQFDFIGLTLLTAGLALLFLAVTLVKTSKSWTEPHVLVMVIIGPILLVLFPIWEKFPKYPFLPMKNMKNRTLITGCVFAGIHAMATSLYNPYYMPWLLVCKGLSVTAATNASATLSVSYIVTTIIAAFIIRYTRRVKPCIVAGSCIYTLGLGLTYHYRQPDVPLAKFIVTQAVEGVGNGLLQSPALVLTQSSMPKHLVISATAIYYTINSIGRVVGDAISGSLYRQQYPKRLAEFAPFMDEKTVQRMVNDVNSPLKFAWGSEERVAVIEAFNHVYRKMLYGPMIIAAVGILIALTFPNINMSEVDNGFVVEETEEDMPATAVVNEKKQQQPSETSESETEKKLPEVSSSHTVSSGPRSADLSVEEHERRV

SEQ ID NO: 52186 - protein, 473 aa, Bacillus cereus G9241
MMDQNQGLKRELKSRHIFMIALGGVIGTGLFLGSGYTIHEAGPGGAIVAYLVGGFVMYLTMLCLGELAVAMPDAGSYQTYATKHISPAAGYVVGWMSWLNWSATIGIELIAVSILMKRWFPDVPSWIWCVVFAALLFAINALSSRSFAEVEFWFASIKVITIIAFIILGGAAMFGFLDMKGNEPAPMFSSFTDYGGLFPNGLSAILITMIAVNFSFQGTELVGIAAGESENPEKTIPKAINNTVWRILVFFVLSIFILAGLFPWQQAGVIESPFVVVFDKIGIPYAADIINFVIITAVLSVANSGLYATSRMLWSMSNQGMISPIFGKLSKNGVPIYALIVSTIVGCLSLLSGIYAEDTVYLWLLSIAGFGAILVWASIALSNLLARRSYIKQGGDVKDLKFKTPLYPFVPLLALVLNVTVIVGMAFIPEQRMALYCGIPFMIVCLLFYRATRNKGSNLEHIEKTKTTEIESL

SEQ ID NO: 52187 - protein, 323 aa, Rhodospirillum rubrum
MLGKPVVLVTRTLPAAVEERLLGDYDVWLNRDDRPIPPEDLPALARRLGAQAMLVTPTDRLERAVIEALPNSVAIIASFSVGYEHIDHNAAARRGILVTNTPGVLSDATADIALLLMLGAARRASEGERLVRSGYWKGLTPVQLLGRHLHGQRLGILGMGRIGQALAERARPLGLEIHYHNRTPIAEDAAKGAIFHATVEDLLAVSDVLSLHCPATPLTRKLLNAERLALLPPGAIVVNTARGILIDDEALIAALNSGQVFAAGLDVYDNEPDLHPAYRSLPNVFLLPHLGSATIETRTAMGFLALDNLDAYFGGREPPHRIA

SEQ ID NO: 52188 - protein, 128 aa, Lactuca sativa
STAADQTHTTATPMAIKTSGRKRFRTKFSLDQKEKMTIFAEKLGWKMQRCDDKLIADFCNEIGIRRGIFKVWMHNNKNNFGKREKDITTTAITGVAAAVVRSNDSTHQDNGSDDVHLQASTNGSSSSS

SEQ ID NO: 52189 - protein, 550 aa, Pichia jadinii
MPYTPIDIKAEQEAFEREVAAVEQWWKEPRWRKTTRIYTAKDIVQKRGTLQIHYPSSDQAKKLYKLLEEHDRNKTASFTFGALDPIHVTQMAKYLDTVYISGWQSSSTASTSNEPSPDLADYPYDTVPNKCEHLWFAQLFHDRKQHEERFRMTPEERAKTPYTDFLRPIIADADTGHGGITAIIKLTKLFIERGAAGIHIEDQAPGTKKCGHMAGKVLVPIQEHINRLVAIRTAADIFGSDLLCVARTDSEAATLLTSTIDHRDHYFIIGSTNKDLQPLSEVMFQAEQRGLLKVMLAAVEEDWTKKAGLKLFHEAVIDEINSGYYPNKQALIAEFTTKVHPLSNTSNKEARALAKKLTGKDIFFDWEAPRVREGYYRYQGGTQCAVNRARAYAPYADIIWMESKLPDYAQAKEFADGVKAQWPEQWLSYNLSPSFNWNKAMSVLYQETYIQKLAKLGYVWQFITLAGLHTTALAVDNFARDYAKIGMRAYGQQIQAPEIENGVEVVKHQKWSGAEYIDNLLKLVTGGVTSTAAMGKGVTEDQFKDDKSKL

SEQ ID NO: 52190 - protein, 140 aa, Axonopus compressus
LVKWKGFQQGLYMGNGGGANVVAKGYTKGDGLGAEIVGTFILVYTVFSATDAKRNARDSHVPILAPLPIGFAVFLVHLATIPITGTGINPARSLGAAIIYNREHAWNDHWIFWVGPFIGAALAAIYHQVIIRAIPFKSRS

SEQ ID NO: 52191 - protein, 513 aa, Marchantia polymorpha
MAKHSLKQPLLDKEDQPPVLPPSSYNGSESQGLAEEPKGEFKTWLVEELTHQFWLAGPMILVNLLQYLLNVVSVMFVGHLGELALASSSIATSLAGVTGYHVMMGLASALETLCGQAFGAKEYRLSGIFLQRAIFVLTLCAFPISFVWWHMGTILKFIGQDPSISDGAMEYARFLIPSLFAYAFLQPLVKFLQTQSAVNSMAVFSGITLLFHAPLCYMLVFYFGIGFRGAAIANSISQWINVIFLALYVRFSPTCKRTWTGFSREALHDIFYFLKLAVPSTVMVCLEYWCFESIVLLSGLLPNPKLETSALAICLNTIALMYMVPFGLSAAVSTRVSNELGAGRPYAAKAAVKLTVSLALLEGCLMSILLISVRGVWPYLYSGDAEVVNYVSKMVPFLATLAILDGFQGTLCGVARGCGWQHLGAYTNLGAFYVIGIPTALLMAFHFHLNGYGLWIGIICGLVTQAFLLAVITLTLNWQKLADEATDRVHHSYVEGDVLPKHGQKVDHSQLTQ

SEQ ID NO: 52192 - protein, 305 aa, Brassica napus
MDHEEIPSMPSTPATTPGTPGAPLFGGFDGKRSGHNGRYTPKSLLKSCKCFSVDNEWALEDGRLPPVSCALPPPNVSLYRKLGAEFVGTLILIFAGTATAIVNQKTDGAVTLIGCAASAGLAVMIVILSTGHISGAHLNPAVTISFAALKHFPWKHVPVYIGAQVLASVCAAFALKAVFEPTMSGGVTVPTVALSQAFALEFIISFNLMFVVTAVATDTRAVGELAGIAVGAPVMLNILIAGPATSASMNPVRTLGPAIAANNYRAIWVYLTAPILGALIGAGTYTVVKLPEEDEEHKEKRSFRR

SEQ ID NO: 52193 - protein, 447 aa, Arabidopsis thaliana
MSQHMNLLLPSFETDKEEYDERKTTDHGGIGGSVWRFKGNKAAKEAASVSMKGTLARLFDCCSKDVKKTILPLGHGDPSVYPCFQTSVDAEEAVVESLRSGAANSYAPGVGILPARRAVANYLNRDLPHKIHSDDIFMTVGCCQGIETMIHALAGPKANILLPTLIYPLYNSHAIHSLVEIRKYNLLPDLDWEIDLQGVEAMADENTIAVVIMNPHNPCGNVYTYEHLKKVAEVARKLGIMVISDEVYNQTIYGENKFVPMGIFSSITPVVTLGSISKGWLVPGWRIGWIAMNDPKNVFKTTRVVESIKEHLDISPDPSTILQFALPNILEKTKKEFFEKNNSILSQNVDFAFDALKDIPCLTCPKKPESCTYLVTKLDLSLLEDITNDFDFCMKLAQEENLVFLPGEVLGLKNWVRFSIGVERSMLEDAFMRLKGFFARHTKTQLT

SEQ ID NO: 52194 - protein, 337 aa, Zea mays
MGKIKIGINGFGRIGRLVARVALQSEDVELVAVNDPFITTDYMTYMFKYDTVHGQWKHSDITLKDSKTLLFGEKPVTVFGIRNPEEIPWGEAGAEYVVESTGVFTDKDKAAAHLKGGAKKVVISAPSKDAPMFVVGVNEDKYTSDVNIVSNASCTTNCLAPLAKVIHDNFGIIEGLMTTVHAITATQKTVDGPSAKDWRGGRAASFNIIPSSTGAAKAVGKVLPELNGKLTGMSFRVPTVDVSVVDLTVRIEKGASYEEIKKAIKAASEGPLKGIMGYVEEDLVSTDFTGDSRSSIFDAKAGIALNDHFIKLVSWYDNEWGYSNRVVDLIRHMFKTQ

SEQ ID NO: 52195 - protein, 279 aa, Triticum aestivum
MSPQVRPPAGPPDVGSHYLTELLQEHQKLVPFTQVLPICSKLLGNEIMRVSCLLKHQHGGDFERLPPMASPNQMHHHPSPPMPNFCGNGFGPWNHGAHPERVGFPQGPVGWQGAPQSPSSYIVKKILRLEIPTDTYPNFNFIGRLLGPRGNSLKRIEASTGCRVFIRGKGSIKDPGKLKGRPGYEHLDDPLHILIEAELPANVIDARLSKAQEILEELLKPVDESQDYYKRQQLRELAMLNSPLREESPRLSPHPSPHPSPHQGGASPFSNGGMKRSKQ

SEQ ID NO: 52196 - protein, 433 aa, Cryptococcus neoformans var. neoformans B-3501A
MAALSDRQKDELHRAMLAYLHAAGMHNAYAALQHDAALADVDPRDRAVGLLEKKWTSVIRLQKKVIDLENRNAALLAELAAAARPAAPGPFLPRPPPRHTLASHRAPVTRLAFHPTWTLLASASEDATVKLWDWEAGDMERTLKGHTKAVMDVDFDPRGGLMATCSSDLTLKLWDTANQYTNVKTLHGHDHSVSSVRFMPDGETLVSASRDKTIRVWQVSSGYCIKTFSGHAEWVREAVPSEDGRWLVSASNDQTSRIWDFSTGETKMELRGHEHVVECAVFAPVNAYPAIRELAGLKPPAPRDTRAKSPGVYAATGSRDKTIKLWDALSGQCLRTLVGHDNWIRALVFHPSGKYLLSASDDKTIKVWDLANGRCTKTIEAHSHFVTSMTWGRAVGASGGIEKVNGDASSKEPRRINVLATGSVDQTIKVWTP

SEQ ID NO: 52197 - protein, 922 aa, ASPERGILLUS NIDULANS FGSC A4
MASAGPATADGGAGHSHAASGHHLHATNVQSKRRTMIATPTGQWSLGKTLGAGSMGKVKVGKHLETGEQVAIKIVPRQSTEEHRSQREAERADRSKEVRTAREAAIVSLVNHPYICGMRDVVRTNYHWYMLFELVNGGQMLDYIISHGKLKEKQARKFARQIASALDYCHRNSIVHRDLKIENILISKTGDIKIIDFGLSNLFSPRSLLKTFCGSLYFAAPELLQARQYTGPEVDVWSFGIVLYVLVCGKVPFDDQSMPKLHAKIKSGVFEYPPGLTAECRHIISRMLVTDPKQRASLTEIMNHPWMNKGFSGPPDNHLPHREPLQLPLDPEVIEKMTGFEFGKPEYITAQLTKIIESEEYQHAIALNAREHPVPAHTDKKRGVFDFYKRRNSASRDTLSAPSAEAVQLGNDPLNAYSPLLSVYYLVKEKLDRERSESNPGALSIAQAPGDMLQVPDLAPPEAAHTNQYQVPGEKDTGRRSRPRARTHGDDEITEGMKNASLAPNHAQASHSPAASQPDTPAKKESTAAGLLRRFSTRRTKDRSRDRERSRLASPHQPSLNVQPPADSASPLSRGFSMRKNRRTEPSATAIPSTGSQPQHQDLLKTPGSVEPASRSNKYLERSISVSSGEPRHRRSRRTEGDSGSQPPQTSGSEYSAVPKDSTAGREQKIAPRTHASRTMSLGHARRESIQARRARRDAAREANVPEETDGEISGPGAALESANEEDLSKPVYLKGLFSVSTTSSKPLAFIRADIIRVLKQLAVDYVEIKGGFSCRHAPSIELDKVVDNGPPSPERQGQVSNHRRRISLGGLLNHDDGREELARTTTRRRHRAPDRSFVSNSEVSDEYLETRDTTVTSGERVVGETTTRVQSDTGGNLVLRFEILIVKVPLFSLHGIQFKKVSGGMWQYREMAKKILDALRL

SEQ ID NO: 52198 - protein, 420 aa, Magnaporthe grisea 70-15
MASDSIKAALEQASQSNDAAAALEKLLVDFKSLSSPATATADLKRVIDAVLNAQLGVVSTLPILSAFVNAVRQLENDDLWIEVGNYALQRIGENTQTASSFLEQSNALRELIATAHEHNEDWTDAAKTLAEIPLDSSQRRATEEEMVRVWIRIVRNYLEADDSTTAGSYLNKVKNVIFKVQDRDLNLHFRLSQARINDSQREFLAASHAYHEISLSPQIAEEERLHTLSMAIKCAVLAPAGPLRSRALGRLYRDERSAGQEEYGILEKMFLDRLLSPGEVDKFAQGLSPHQLATTADGSTVLAKAVVEHNLLGASRLYDNIGFDELGELLGLDGAKAEETTARMIEQGRLVGRIDQVDRVIWFESGEASGVKGSGRAKVVVGKEIRRWDANVQDLAEEVEHVTSLLQKEYPDFVAANLVV

SEQ ID NO: 52199 - protein, 162 aa, Bacteroides thetaiotaomicron VPI-5482
MEYKDQKYTYLGGLIHGISTLATGMKTSIKVYFRKKVTEQYPENRKELKMFDRFRGTLAMPHNENNEHRCVACGLCQIACPNDTITVTSETIETEDGKKKKILAKYEYDLGACMFCQLCVNACPHDAITFDQNFEHAVFDRTKLVLQLNHAGSKVIEKKKEV

SEQ ID NO: 52200 - protein, 545 aa, Arabidopsis thaliana
QNYSHLSQVEKEAEAKGVAMGQALDIAIPPPRPKRKPNNPYPRKTGSGTILMSKTGVNDGKESLGSEKVSHPEMANEDRQQSKPEEKTLQEDNCSDCFTHQYLSAASSMNKSCIETSNASTFREFLPSREEGSQNNRVRKESNSDLNAKSLENGNEQGPQTYPMHIPVLVPLGSSITSSLSHPPSEPDSHPHTVAGDYQSFPNHIMSTLLQTPALYTAATFASSFWPPDSSGGSPVPGNSPPNLAAMAAATVAAASAWWAANGLLPLCAPLSSGGFTSHPPSTFGPSCDVEYTKASTLQHGSVQSREQEHSEASKARSSLDSEDVENKSKPVCHEQPSATPESDAKGSDGAGDRKQVDRSSCGSNTPSSSDDVEADASERQEDGTNGEVKETNEDTNKPQTSESNARRSRISSNITDPWKSVSDEGRIAFQALFSREVLPQSFTYREEHREEEQQQQEQRYPMALDLNFTAQLTPVDDQEEKRNTGFLGIGLDASKLMSRGRTGFKPYKRCSMEAKESRILNNNPIIHVEQKDPKRMRLETQAST

SEQ ID NO: 52201 - protein, 327 aa, Arabidopsis thaliana
MTLEALSSNGLLNFLLSETLSPTPFKSLVDLEPLPENDVIISKNTISEISHQEPPPQRQPPATNQGKKRRRRKPRVCKNEEEAENQRMTHIAVERNRRRQMNQHLSVLRSLMPQPFAHKGDQASIVGGAIDFIKELEHKLLSLEAQKHHNAKLNQSVTSSTSQDTNGEQENPHQPSSLSLSQFFLHSYDPSQENRNGSTSSVKTPMEDLEVTLIETHANIRILSRRRGFRWSTLATTKPPQLSKLVASLQSLSLSILHLSVTTLDNYAIYSISAKVEESCQLSSVDDIAGAVHHMLSIIEEEPFCCSSMSELPFDFSLNHSNVTHSL

SEQ ID NO: 52202 - protein, 210 aa, Glycine max
  misc_feature (183)..(183): Xaa can be any naturally occurring amino acid
  unsure (1)..(210): unsure at all Xaa locations
MNLAKGVGGNIDKSQVLSAVEKYEKYHASYGGQEEERKANYVDMVNKFYDLATSFYEYGWGQSFHFAPRWKGESVREGIKRHEHFIALQLCLKPGQKVLDVGCGIGGPLREISRFSSTSITGLNNNEYQITRAKELNRNTGVDKTCNFVKADFMKMPFPDNNFDAVYAIEATCHAPDGYACYXEIFRVVKPGQLFAAYEWCMTESFRSQH

SEQ ID NO: 52203 - protein, 81 aa, Pinus pinaster
TVTAYYLSSQGPKHDEIDYEFLGNLSGDPYIMHTNIFAQGLGNREQQFYLLFDPTLAFYTYSVLWTPNHITFSVDGIPVRV

SEQ ID NO: 52204 - protein, 445 aa, Arabidopsis thaliana; identical to SEQ ID NO: 1356

SEQ ID NO: 52205 - protein, 343 aa, Saccharum officinarum
MAPSSYEMAASILLCAEDSSSILDLEAEAEEEEVMLARSSRTRGDPSVVFPVPSEECVAGFVEAEAAHMPREDYAERLRGGGMDLRVRMDAVDWIWKVHAYYGFGPLTACLAVNYLDRFLSLYQLPEGKAWTTQLLSVACLSLAAKMEETYVPPSLDLQIGDARYVFEAKTIQRMELLVLSTLKWRMQAVTPFSYIDYFLHRLNGGDAPSRRAVLRSAELILCTARGTHCLDFRPSEIAAAVAAAVAGEEHAVDIDKACCTHRVHKERVSRCLEAIQATVALPGTVPRSPTGVLDAAGCLSYRSDDTAVAAAAAASHASSSSWCDEDDDSSPVVCSKRRKISR

SEQ ID NO: 52206 - protein, 877 aa, Escherichia coli K12
MKAVSRVHITPHMHWDREWYFTTEESRILLVNNMEEILCRLEQDNEYKYYVLDGQTAILEDYFAVKPENKDRVKKQVEAGKLIIGPWYTQTDTTIVSAESIVRNLMYGMRDCLAFGEPMKIGYLPDSFGMSGQLPHIYNGFGITRTMFWRGCSERHGTDKTEFLWQSSDGSEVTAQVLPLGYAIGKYLPADENGLRKRLDSYFDVLEKASVTKEILLPNGHDQMPLQQNIFEVMDKLREIYPQRKFVMSRFEEVFEKIEAQRDNLATLKGEFIDGKYMRVHRTIGSTRMDIKIAHARIENKIVNLLEPLATLAWTLGFEYHHGLLEKMWKEILKNHAHDSIGCCCSDKVHREIVARFELAEDMADNLIRFYMRKIADNMPQSDADKLVLFNLMPWPREEVINTTVRLRASQFNLRDDRGQPVPYFIRHAREIDPGLIDRQIVHYGNYDPFMEFDIQINQIVPSMGYRTLYIEANQPGNVIAAKSDAEGILENAFWQIALNEDGSLQLVDKDSGVRYDRVLQIEESSDDGDEYDYSPAKEEWVITAANAKPQCDIIHEAWQSRAVIRYDMAVPLNLSERSARQSTGRVGVVLVVTLSHNSRRIDVDINLDNQADDHRLRVLVPTPFNTDSVLADTQFGSLTRPVNDSAMNNWQQEGWKEAPVPVWNMLNYVALQEGRNGMAVFSEGLREFEVIGEEKKTFAITLLRGVGLLGKEDLLLRPGRPSGIKMPVPDSQLRGLLSCRLSLLSYTGTPTAAGVAQQARAWLTPVQCYNKIPWDVMKLNKAGFNVPESYSLLKMPPVGCLISALKKAEDRQEVILRLFNPAESATCDATVAFSREVISCSETMMDEHITTEENQGSNLSGPFLPGQSRTFSYRLA

SEQ ID NO: 52207 - protein, 236 aa, Glycine max
  misc_feature (201)..(201): Xaa can be any naturally occurring amino acid
  unsure (1)..(236): unsure at all Xaa locations
MVSLKLQKRLAASVLKCGRGKVWLDPNEVNEISMANSRQNIRKLVKDGFIIRKPTKIHSRSRARRMKEAKKKGRHSGYGKRKGTREARLPTKILWMRRMRVLRRLLRKYRESKKIDKHMYHDMYMKVKGNVFKNKRVLMESIHKSKAEKAREKTLSDQFEAKRAKNKASRERKLARREERLAQGPIDKTSTAPSAPAATAXPVYPSAKEIQEVSSISWNSKDVESLIIALAKSLVC

SEQ ID NO: 52208 - protein, 488 aa, Pseudomonas aeruginosa PAO1
MSSPSLVELKAILRLAGPLIAAQLAYVAMVFTDTVMMGKLGPDALAAGGLGAVSYAFVSTFCVGVVAAVGNLVAIRHGCDDAAGAAAAARSGLWVGAALALAAGLLLWNLRPLLLVFGQAPQTVDGAMQFLHSLTFALPGYMAFMVLRGFTSAIDRAGPVMAISVLGALANLALNYSFIEGLFGLPRLGLAGIGLVTALVMNCMPLLLALYIRLQPAYAEYSLLRGLGRPQRAMVEEILRLGLPIGGTYAVESGMFTVATLCMGIIGDHALAAHQIAIQAVYVAFMVPVGLSYATTYRIGQHFGAGRLLEARRAGRVGIGFGALCMLLFAGLFWWMPEAIIGLFLDRDAPANREVAAMAVSLLAIAAWFELFDGTQNVAMGAIRGLKDARTTFLVGLACYWLVGVPLACLLAFAAGWGAAGVWWGLAGGLACAAIGLTLAFEWKTARLLPKATASEASALNCRAAGRGAPSARLCPGNAPVPPTAAAD

SEQ ID NO: 52209 - protein, 300 aa, Brassica napus
  misc_feature (291)..(291): Xaa can be any naturally occurring amino acid
  unsure (1)..(300): unsure at all Xaa locations
MVSDNGEPMMVITNESQRSVPTPFLIKTFNLVEDPSIDDVISWNEDGSSFVVWNPTDFARDLLPKHFKHNNFSSFVRQLNTYGFKKVVPDRWEFSNDFFRRGEKRLLKEIQRRKLTPQAAAVPPPEVVAAAAAQRVQTTKTVVSPSSSAEDQAVSPSWYCQTGNGGGLSVELLEENEKLRSQNIQLNRELTQMKSLCDNIFSLMSNFSGSPPERSSSPGASTSHDAMKTVEFLPAKRFSVETEGEEEASHRLFGVSIGLKRTRSEGVQVKAVGERPGGGGEKEETPWLRHXYRTNQRVCN

SEQ ID NO: 52210 - protein, 167 aa, Zea mays
MGKQKIVLKLPLDDERKRRKAFKAAVGMNGVTSATMEGDKITVVGDGVDPITLTTILRRSLGYAELLSVSSGDDKKKGDGYGYGSAGGMMYGGGGYGGGKEGKESKESSGGKSSGGGGGYGGHYQAMPSVSYPAAYQQYNAMPPYPAVYSYPAAYPQQEQDPGCSIM

SEQ ID NO: 52211 - protein, 198 aa, Cucumis melo
MSSNGVSSSISKRLAGKVALITGGASGIGESTVRLFVENGAKVVVADVQDDLGAVLCKELDDGTGYNVSYFHCDVTDESDISNAVDYAVEKYGKLDIMFNNAGIRGDVGATTLTTDMNDFKKVFDVNVFGSFMGAKHAARVMAPAKTGCILFTSSMASVICSGNAPAYAASKHAIIGLMKTLAVELGPKGIRVNAISP

SEQ ID NO: 52212 - protein, 321 aa, Pseudomonas putida KT2440
MKYLVVGGAGYIGSHMVKHLLAAGHEVLVADLVSPGPGIQWAKLDIADEAALDVLFGVCRFDAVFHFASFIQVGESVSAPGKYYQNNVAATLSLLQAMVNAGIRHLVFSSSAAVYGNPQYVPIDEAHTKGPINPYGLSKWMVEQILEDFDRAYGLKSVSLRYFNAAGADPEGQLGERHEPETHLIPLILQAASGRREAVTVFGRDYDTPDGTCIRDYVHVADLAAAHALAVDYLLDGGERAAFNLGNGLGFSVQQVIDTARAVTGRQITALDAQRRAGDPPRLVADASKAMQVLGWRPAFASLEQIVRHAWQWELQYPWRR

SEQ ID NO: 52213 - protein, 255 aa, Bacillus subtilis subsp. subtilis str. 168
MDVEVKKNGKNAQLKDHEVKELIKQSQNGDQQARDLLIEKNMRLVWSVVQRFLNRGYEPDDLFQIGCIGLLKSVDKFDLTYDVRFSTYAVPMIIGEIQRFIRDDGTVKVSRSLKELGNKIRRAKDELSKTLGRVPTVQEIADHLEIEAEDVVLAQEAVRAPSSIHETVYENDGDPITLLDQIADNSEEKWFDKIALKEAISDLEEREKLIVYLRYYKDQTQSEVAERLGISQVQVSRLEKKILKQIKVQMDHTDG

SEQ ID NO: 52214 - protein, 413 aa, Aureoboletus thibetanus
GKSTTTGHLIYKCGGIDKRTIEKFEKEAAELGKGSFKYAWVLDKLKAERERGITIDIALWKFETPKYMVTVIDAPGHRDFIKNMITGTSQADCAILIIASGTGEFEAGISKDGQTREHALLAFTLGVRQLIVAVNKMDTTKWSEDRFNEIIKETSTFIKKVGYNPKAVAFVPISGWHGDNMLEESPNMPWYKGWTKESKSGVVKGKTLLDAIDAIEPPVRPSDKPLRLPLQDVYKIGGIGTVPVGRVETGVIKAGMVVTFAPTNVTTEVKSVEMHHEQLVEGVPGDNVGFNVKNVSVKDIRRGNVASDSKNDPAKEAASFNAQVIVLNHPGQIGAGYAPVLDCHTAHIACKFAELIEKIDRRSGKSLEASPKFVKSGDACIVKLVPSKPMCVESYNEYPPLGRFAVRDMRQTV

SEQ ID NO: 52215 - protein, 373 aa, Arabidopsis thaliana
MGYLLEETLSSNSKTPIVIDDDNELGLMAVRLANAAAFPMVLKAALELGVFDTLYAEASRSDSFLSPSEIASKLPTTPRNPEAPVLLDRMLRLLASYSVVKCGKVSEGKGERVYRAEPICRFFLKDNIQDIGSLASQVIVNFDSVFLNTWAQLKDVVLEGGDAFGRAHGGMKLFDYMGTDERFSKLFNQTGFTIAVVKKALEVYQGFKGVNVLVDVGGGVGNTLGVVASKYPNIKGINFDLTCALAQAPSYPGVEHVAGDMFVDVPTGDAMILKRILHDWTDEDCVKILKNCWKSLPESGKVVVIELVTPDEAENGDINANIAFDMDMLMFTQCSGGKERSRAEFEALAAASGFTHCKFVCQAYHCWIIEFCK

SEQ ID NO: 52216 - protein, 541 aa, Arabidopsis thaliana
MVGASSSYASPLCTWFVAACMSVSHGGGDSRQAVALQSGGRSRRRRQLSKCSVASGSASIQALVTSCLDFGPCTHYNNNNALSSLFGSNSVSLNRNQRRLNRAASSGGAMAVMEMEKEAAVNKKPPTEQRRVVVTGMGVETSLGHDPHTFYENLLQGNSGISQIENFDCSEFPTRIAGEIKSFSTEGWVAPKLSKRMDKFMLYLLTAGKKALADGGVTDEVMAEFDKTKCGVLIGSAMGGMKVFYDAIEALRISYKKMNPFCVPFATTNMGSAMLAMDLGWMGPNYSISTACATSNFCILNSANHIIKGEADVMLCGGSDAVIIPIGLGGFVACRALSQRNNDPTKASRPWDTNRDGFVMGEGAGVLLLEELEHAKKRGATIYAEFLGGSFTCDAYHMTEPHPDGAGVILCIERALASAGISKEQINYINAHATSTHAGDIKEYQALAHCFGQNPELKVNSTKSMIGHLLGAAGAVEAVATVQAIRTGWVHPNINLENPDSGVDTKLLVGPKKERLDIKAALSNSFGFGGHNSSIIFAPYK

SEQ ID NO: 52217 - protein, 333 aa, Rhodobacter sphaeroides 2.4.1
MGELIEGVWHPNWYDTASNGGRFVRSRARFRNWITADGSPGPSGEGGFPAEAGRYHLYVAHACPWAHRTMIFRALKDLAPLIDVSVVHPEMLEDGWTFDRSFPGATGDRLYGLAFLREIYLKADPGISARVTVPVLWDRKRETIVSNESAEIIRMFNAAFDHLTGNRVDFLPEGDLAEIDRLNDRIYGTVNNGVYRAGFATTQEAYDEAAAPLFETLDWLEERLATRRYLVGDRLTEADWRLFTTLVRFDKVYHTHFKCNRRQIVQYPNLWGWLRELWQVPGVAETVHFDHIVRHYYFSHDTINPHRIVPLTPDPDFAAPHGRDQLFQASRLR

SEQ ID NO: 52218 - protein, 338 aa, Arabidopsis thaliana
  misc_feature (273)..(273): Xaa can be any naturally occurring amino acid
  misc_feature (297)..(297): Xaa can be any naturally occurring amino acid
  unsure (1)..(338): unsure at all Xaa locations
MSSTKDMSTVQNATPFNGVAPSTTVRVTIVQSSTVYNDTPATIDKAEKYIVEAASKGAELVLFPEGFIGGYPRGFRFGLAVGVHNEEGRDEFRKYHASAIHVPGPEVARLADVARKNHVYLVMGAIEKEGYTLYCTVLFFSPQGQFLGKHRKLMPTSLERCIWGQGDGSTIPVYDTPIGKLGAAICWENRMPLYRTALYAKGIELYCAPTADGSKEWQSSMLHIAIEGRCFVISQQLSLFFDACWALMETICLTLDRKEAVIISPLGQVLAGXPNFESEGYQSQADIDLGDIVKSQXYFDSVGHYSRPDVLHLTVNEHPRKSVTFVTKVEKAEDDSNK

SEQ ID NO: 52219 - protein, 254 aa, Saccharum officinarum
AIDWIWKVIEHYNFAPLTAVLSVNYLDRFLSTYEFPEDRAWMTQLLAVACLSLASKMEETFVPLPLDLQVAETKFVFEGRTIRRMELHVLNTLKWRMHAVTACSYVKYFLHKLSDHGAPSLLARSRSSDLVLSTAKGAEFVVFRPSEIAASVALAAMGECRSSVIERAASSCKYLNKERVLRCHEMIQEKITMGSIVLKSAGSSISSVPQSPIGVLDAAACLSQQSDDATGGSPAVCYHSSSTSKRRRISRRLL

SEQ ID NO: 52220 - protein, 441 aa, Arabidopsis thaliana
DAIGITPLYIGWGLDGSVWFASEMKALSDDCEQFMCFPPGHIYSSKQGGLRRWYNPPWFSEVVPSTPYDPLVVRNTFEKAVIKRLMTDVPFGVLLSGGLDSSLVASVALRHLEKSEAACQWGSKLHTFCIGLKGSPDLKAGREVADYLGTRHHELHFTVQDGIDAIEEVIYHVETYDVTTIRASTPMFLMSRKIKSLGVKMVLSGEGSDEIFGGYLYFHKAPNKKEFHEETCRKIKALHQYDCLRANKSTSAWGVEARVPFLDKEFINVAMSIDPEWKMIRPDLGRIEKWVLRNAFDDEKNPYLPKHILYRQKEQFSDGVGYSWIDGLKDHANKHVSETMLMNASFVFPDNTPLTKEAYYYRTIFEKFFPKSAARATVPGGPSVACSTAKAVEWDAAWSQNLDPSGRAALGVHVSAYGEDKTEDSRPEKLQKLAEKTPAIV

SEQ ID NO: 52221 - protein, 273 aa, Synechococcus elongatus PCC 7942
MAVFELGMTAISDCFAALRSQGRCALIPFLTAGDPDLETTRQALLALDREGADLIELGVPYSDPLADGPVIQAAATRALQAGTRLDDVLALLKDVRSQIKAPIVLFTYCNPILNRGFEAFLDQIAAAGANGLVVPDLPLEESQRLSEVAAERGIDLILLIAPTSSADRIAAISKQARGFIYLVSVTGVTGMRQGMQSRVADLLQEIRQGTDKPIGVGFGISGAEQARQVRDWGADGVIVGSAFVNRLQEQGVEGVATLCRELRQAIDRQPVLS

SEQ ID NO: 52222 - protein, 294 aa, Saccharum officinarum
MEQYEKVEKIGEGTYGVVYKGLDKATNETIALKKIRLEQEDEGVPSTAIREISLLKEMNHDNIVRLHDVIHSEKRIYLVFEFLDLDLKKFMDSCPEFAKNPTLIKSYLYQILRGVAYCHSHRFLHRDLKPQNLLIDRRTNTLKLADFGLSRAFGIPVRTFTHEVVTLWYRAPEILLGAKQYSTPVDVWSVGCIFAEMVNQKPLFPGDSEIDELFKIFRVLGTPNEQSWPGVSCLPDFKTAFPRWQAQDLATIVPNLEPAGLDLLSKMLRYEPSKRITARQALEHEYFKDLEMVQ

SEQ ID NO: 52223 - protein, 876 aa, Neurospora crassa
MATTLSSGAAAELPIRSQSVRTRRPPTTSRPEPPLPRSESTNRAEASRPHRRSSQRSASGATTAATTTTTTSTATSSRHHPHPSQQQQQYHHQQQPDMSAAAAAAAAPHGHASAGDDHRNGADAGVSTHRSATGTTKQRYRTVIPAPSGNYAFIKTIGQGSMGKVKLAKKEGTNELASQPIKCDISLIIERVSPDDGRQSREEREKADAAREDRNAREAAIVSLLNHQYICGLRDNLRTRWHWYMLFEYVNGGQMLDYIISHGKLKEKQARKFARQIASAVDYCHRNSIVHRDLKIENILISKTGDIKIIDFGLSNLFSPEEDRKLKTYCGSLYFAAPELLQARPYTGPEVDVWSFGVVLFVLVCGKVPFDDQYMPALHQKIKKGAVDYPNWLSSECKHLISRMLVTDPKQRATMQEVMNHPWMLKGYNGPPDNYLPRREPLTLPLDPEVISQMTGFKFGPPEYITAELTKRIKSPKYQAAVRRLEKERERPEPIAKDAEKKRGFGFDFYKRRNSVTSKDTLTAASSEGLSLGDDPLNAFDPLISIYYLVREKLERERNHVYIDLQQPSKAQQPPPSSSQTVMPVPPSPVIRPKEKHSLADIVPPQPVHNAEPRSRQRTRSHSEDQPREPIQGGLLSPDMVPAKKESTAAGILRRLSTRDRRKEPPATASSTDGKPPLRGSMSMRAKSLGHARRESIQMRRAKREAEAAAAQQAQSQTTEPQRSYQSHHHSVREETDAELVDSDIRGETSGGSNERLEPEDPDLVKPVFLKGIFSVSTTSTKPLSEIRADIKRVLRVLGVEFNEIKGGFSCRHTPSINHAERQPTVMTEGGNEIEFEILIVKVPIVSLHGVQFKRLAGNTWQYKALAEQIVRELRL

SEQ ID NO: 52224 - protein, 281 aa, Thiobacillus denitrificans ATCC 25259
MTQTMSLPIPAAYSLDSYIQTVSHYPMLSLEEEQKLARAWHDEQDLEAARRLVLSHLRVVVSIARHYLGYGLPHADLIQEGNVGLMKAVKRFDPDRGVRLVSFALHWIRAEIHEYVLKNYRMVKLATTKAQRKLFFNLRSLKQSLNALTVQQADAMAQELNVSRKDVLEMETRLSGHDVSIDPMVDDGEDDYSPIAYLASAEENPAQRLEREQTERLRESGLTSALEELDERSRHIIQARWLSEGDVATLHELAAQYGVSAERIRQIEARALQKMRASIPA

SEQ ID NO: 52225 - protein, 170 aa, Prochlorococcus marinus subsp. pastoris str. CCMP1986
MLSSIDKFLKLMVVDVQNTTVVSANGEAKKLGQYSGNVILIVNVASYCGNTAQYKDLQKLHDKYSKKGLRILAFPCNDFGNQEPDSLTEIKNFCSTKYGVEFEIMEKVHAKGNTSEPYTTLNNVEPKGDVEWNFEKFLIGKDSNVIARFKPGIQPFDENLIAAIEVAIDS

SEQ ID NO: 52226 - protein, 396 aa, Linum usitatissimum
MALKLNPVTTFPSTRSLNNFSSRSPRTFLMAASTFNSTSTKEAEKLKKSHGPPKEVHMQVTHSMPPQKLEIFKSLEGWAEDVLLPHLKPVEKCWQPQDFLPEPESDGFEEQVKELRARAKELPDDYFVVLVGDMITEEALPTYQTMLNTLDGVRDETGASLTPWAIWTRAWTAEENRHGDLLNKYLYLSGRVDMRQIEKTIQYLIGSGMDPKTENNPYLGFIYTSFQERATFISHGNTARLAKDHGDMKLAQICGIIAADEKRHETAYTKIVEKLFEIDPDGTVLALADMMRKKISMPAHLMYDGEDDNLFDNYSSVAQRIGVYTAKDYADILEFLVGRWKVDAFTGLSGEGNKAQDFVCGLPARIRKLEERAAGRAKQTSKSVPFSWIFSRELVL

SEQ ID NO: 52227 - protein, 396 aa, Linum usitatissimum
MALKLNPVTTFPSTRSLNNFSSRSPRTFLMAASTFNSTSTKEAEKLKKSHGPPKEVHMQVTHSMPPQKLEIFKSLEGWAEDVLLPHLKPVEKCWQPQDFLPEPESDGFEEQVKELRARAKELPDDYFVVLVGDMITEEALPTYQTMLNTLDGVRDETGASLTPWAIWTRAWTAEENRHGDLLNKYLYLSGRVDMRQIEKTIQYLIGSGMDPKTENNPYLGFIYTPFQERATFISHGNTARLAKDHGDMKLAQICGIIAADEKRHETAYTKIVEKLFEIDPDGTVLALADMMRKKISMPAHLMYDGEDDNLFDNYSSVAQRIGVYTAKDYADILEFLVGRWKVDAFTGLSGEGNKAQEFVCGLPARIRKLEERAAGRAKQTSKSVPFSWIFSRELVL

SEQ ID NO: 52228 - protein, 353 aa, Rubrivivax gelatinosus PM1
MHAHDLSPWQHRHDFAADRGAAERRTHWVIGITLVMMIAEIAAGWWWHSMALLADGWHMGTHAAAIGVAALSYALARRWAGDARFSLGPWKVEVLGAYTSAVLLGVVAIGIAVESGLRLWAPEPVAYDESLVVAAIGLAVNAVCAKLLHGGHDHAPGPGHTGHDHGHHDHHAHHAHAVEHTGQEHAHAATDGKDLNLRAAYLHVLADAATSVLAIGALLAGKYAGWVWVDPLVGLLGAALIAVWSFGLLRQTSTILLDREMDHPLAHQVREQLESDGDARVADLHLWRVGDAQFACQATLVADTPLAADHYRDRLDGLAGLAHVSIEINRCRGASLTATQDHRHGHEPGPHAH

SEQ ID NO: 52229 - protein, 276 aa, Nicotiana tabacum
IALGSAKGLAYLHEDCQPKIIHRDIKAANILVDFNFEAKVADFGLAKLTSDVNTHVSTRVMGTFGYLAPEYASSGKLTEKSDVFSYGIMLLELITGRRPVDSSQTYMDDSLVDWARPQLTRALEDEKFDSLIDPRLGNDYNHNEVARMVACAAACVRHSARRRPRMSQVVRALEGDVSLSDLNEGIRPGHSTVYSSHGSSDYDASQYNEDMKKFRKMALGSQEYGSTGQYSNPTSEYGLYPSGSSSEGQPTREMEMGRTKKDSRGFSGSKGFIGSS

SEQ ID NO: 52230 - protein, 331 aa, Gloeobacter violaceus PCC 7421
MNTVAQVLRPAVERSEALALYRDMVLGRTFEDTCAQMYYRGKLFGFVHLYNGQEAVSTGIIKALRPDDYVTSTYRDHVHALSKGVSARSVMAELFGKATGCSKGRGGSMHLFSAEHNFLGGFAFIGEGIPIACGAAFTAKYQGTDRVSASFFGDGTTNNGQFFECLNMAALWKLPILFVVENNLWSIGMYHPRASSVVEIYKKADAFGIPGVRVDGMDVLAVRAVAKEAVERARTGGGPTLIECTTYRFRGHSLADPDELRDPAEKAHWRKQDPLPRLRVWLEEQGLASVEDLKRIEQEVRAEVDDAVQFAEDSPEPPLDELYRFQFAEDD

SEQ ID NO: 52231 - protein, 423 aa, Streptomyces avermitilis MA-4680
MSPTNRTVVVTGIGATTPLGGDVASTWEGLVAGRSGVRPLEQEWAAEQAVRIAAQIAVEPGEVIPRPQARRLDRSAQFALIAAKEAWADAGFTDKAGADPAVDPDRLGTVIASGIGGVTTLLDQYDVLKEKGVRRVSPHTVPMLMPNGPSANVGLAVGARAGVHTPVSACASGAEAIGYAIEMIRTGRADVVVAGGTEAAIHPLPIAAFGNMMAMSKNNDDPQGASRPYDVARDGFVLGEGAGVIVLESAEHAAKRGARVYAEAVGQGISADSHDIVQPEPEGRGISHALQNLLDSTDLNPAEIVHVNAHATSTPAGDVAELKALRKVFGDDADHFAVSATKSMTGHLLGGAGGVESVASVLALYHRVAPPTINVDNLDPEAEANADIVRGEARKLPVEGRIAALNDSFGFGGHNVVLAFRTV

SEQ ID NO: 52232 - protein, 226 aa, Arabidopsis thaliana
MSSSDSVNNGVNSRMYFRNPSFSNVILNDNWSDLPLSVDDSQDMAIYNTLRDAVSSGWTPSVPPVTSPAEENKPPATKASGSHAPRQKGMQYRGVRRRPWGKFAAEIRDPKKNGARVWLGTYETPEDAAVAYDRAAFQLRGSKAKLNFPHLIGSCKYEPVRIRPRRRSPEPSVSDQLTSEQKRESHVDDGESSLVVPELDFTVDQFYFDGSLLMDQSECSYSDNRI

SEQ ID NO: 52233 - protein, 143 aa, Nicotiana tabacum
PDELNRIQEAGGRVIYWDGPRVLGVLAMSRAIGDNYLKPYVISEPEVTITERTDEDECLILASDGLWDVVSNETACGVARMCLQSRRPPSPQGPPENDVTVTGAGESSDQLCSDASILLTKLALARHSTDNVSVVVVDLRKDL

SEQ ID NO: 52234 - protein, 293 aa, Pirellula sp. 1
MRPVPSAHPDADPPSMTPLQSLFESLRGQNRKALMPFLTTGDPNIDTTEAVIAAARQAGADLCEVGVPYSDPIADGPVIQASYQRALDAGFKLQHVWDLGQRLTENPKVKAMPRVTMVSYSIIYRIGMAKYVDQAMQAGYCGAIVPDLLVEEAEDLSKICREKGFDLIQLVTPTTTRDRQCRIAELSSGFLYYVSVTGITGERTALPTNLVDNVGWLREQTELPICIGFGISGPETAAQLAPVSDGLIVGSAIVRRVADAVEKAKSSGADPVKTAAEEAGDFCHSLRQAIDAA

SEQ ID NO: 52235 - protein, 294 aa, Saccharomyces cerevisiae
MKTLVHVASVEKGRSYEDFQKVYNAIALKLREDDEYDNYIGYGPVLVRLAWHISGTWDKHDNTGGSYGGTYRFKKEFNDPSNAGLQNGFKFLEPIHKEFPWISSGDLFSLGGVTAVQEMQGPKIPWRCGRVDTPEDTTPDNGRLPDYDKDAGYVRTFFQRLNMNDREVVALMGAHALGKTHLKNSGYEGPWGAANNVFTNEFYLNLLNEDWKLEKNDANNEQWDSKSGYMMLPTDYSLIQDPKYLSIVKEYANDQDKFFKDFSKAFEKLLENGITFPKDAPSPFIFKTLEEQGL

SEQ ID NO: 52236 - protein, 447 aa, ASPERGILLUS NIDULANS FGSC A4
MREIVHLQTGQCGNQIGAAFWQTISGEHGLDGSGVYNGTSDLQLERMNVYFNEASGNKYVPRAVLVDLEPGTMDAVRAGPFGELFRPDNFVFGQSGAGNNWAKGHYTEGAELVDNVVDVVRREAEGCDCLQGFQITHSLGGGTGAGMGTLLISKIREEFPDRMMATFSVVPSPKVSDTVVEPYNATLSVHQLVEHSDETFCIDNEALYDICMRTLKLSNPSYGDLNHLVSAVMSGVTTCLRFPGQLNSDLRKLAVNMVPFPRLHFFMVGFAPLTSRGAYSFRAVSVPELTQQMFDPKNMMAASDFRNGRYLTCSAIFRGKVSMKEVEDQMRNIQSKNQSYFVEWIPNNIQTALCSIPPRGLKMSSTFIGNSTSIQELFKRVGDQFTAMFRRKAFLHWYTGEGMDEMEFTEAESNMNDLVSEYQQYQDASISEGEEEYAEEEIMEGEE

SEQ ID NO: 52237 - protein, 458 aa, Petroselinum crispum
MQIFVKTLTGKTITLEVESSDTIDNVKAKIQDKEGIPPDQQRLIFAGKQLEDGRTLADYNIQKESTLHLVLRLRGGMQIFVKTLTGKTITLEVESSDTIDNVKAKIQDKEGIPPDQQRLIFAGKQLEDGRTLADYNIQKESTLHLVLRLRGGMQIFVKTLTGKTITLEVESSDTIDNVKAKIQDKEGIPPDQQRLIFAGKQLEDGRTLADYNIQKESTLHLVLRLRGGMQIFVKTLTGKTITLEVESSDTIDNVKAKIQDKEGIPPDQQRLIFAGKQLEDGRTLADYNIQKESTLHLVLRLRGGMQIFVKTLTGKTITLEVESSDTIDNVKAKIQDKEGIPPDQQRLIFAGKQLEDGRTLADYNIQKESTLHLVLRLRGGMQIFVKTLTGKTITLEVESSDTIDNVKAKIQDKEGIPPDQQRLIFAGKQLEDGRTLADYNIQKESTLHLVLRLRGGDF

SEQ ID NO: 52238 - protein, 355 aa, Burkholderia fungorum LB400
MLLLNPGPVTLTERVRNSLLQTDLCHRESEFFDLQGEARTRLVDLYGLDASEWQAVLMTGSGTAAVESMSAALVPQNGKLLVVENGVYGERISQIAAQYGIAHESLKHDWMQAPDLTKIAAHLDADKAFTHVAVIHHETTTGRLNDLAALGALCRERGLRLLVDGVSSFGAETIDFADSSLDAVAATANKCLHGVPGASFVLVRRAALAQAASRTYYLDLGRLARLQDQRNTPFTPSVHAYYALVEALRELADEGGWRARHARYAALAEQARAGLAERGIGSVLPPEQSSVVLRAYRLPAGITYPQLHDALKARGFVIYAGQGGLSAELFRISTMGNIHAADIDRLLQGFSELMR

SEQ ID NO: 52239 - protein, 541 aa, Mycobacterium leprae TN
MAKTIAYDEEARRGLERGLNSLADAVKVTLGPKGRNVVLEKKWGAPTITNDGVSIAKEIELEDPYEKIGAELVKEVAKKTDDVAGDGTTTATVLAQALVKEGLRNVAAGANPLGLKRGIEKAVDKVTETLLKDAKEVETKEQIAATAAISAGDQSIGDLIAEAMDKVGNEGVITVEESNTFGLQLELTEGMRFDKGYISGYFVTDAERQEAVLEEPYILLVSSKVSTVKDLLPLLEKVIQAGKSLLIIAEDVEGEALSTLVVNKIRGTFKSVAVKAPGFGDRRKAMLQDMAILTGAQVISEEVGLTLENTDLSLLGKARKVVMTKDETTIVEGAGDTDAIAGRVAQIRTEIENSDSDYDREKLQERLAKLAGGVAVIKAGAATEVELKERKHRIEDAVRNAKAAVEEGIVAGGGVTLLQAAPALDKLKLTGDEATGANIVKVALEAPLKQIAFNSGMEPGVVAEKVRNLSVGHGLNAATGEYEDLLKAGVADPVKVTRSALQNAASIAGLFLTTEAVVADKPEKTAAPASDPTGGMGGMDF

SEQ ID NO: 52240 - protein, 637 aa, Lotus uliginosus
MQQKNLSAQLAVAVRSIQWSYGIFWAPSTTQQRELEWRDGFYNGDIKTMKTVQTMETKADKIGLQRSEQLRELYRFLLEGEADPQAKRPSASLSPEDLSDSEWYYLVCMSFVFYPNQSLPGKALEIGETVWLCNAQQADSKFFSRSLLAKSASIQTVVCFPYLGGVIEIGTTEVVSEDPNLIQHVKTCFLEVSKPTCSDKSSSAHDKPHDDNKYPTCTKGDHEVFDKMPLENSCSFAEELKFDEYPGRELQDDDNNEDCDMDGFSDGGYDHYESMIEGINEGGSSQVHFVNDGGEINGAPDSLSSCDCMSEAFDNHGKKDSKNVTQIQQRELLDCDDHSKSSSLDIGADEDLYYTKTLCAILGNSSSFAQNLCASKSSFVKWKKGGVSERKRPWLQQMMLKKTLFDVPFMHLSCSSLKLQKENGRKEWTSKLENADNFMGNVFSDKKRESRNIQVLKSVAPSACEVEKISVLGGTIKYLKNLEARVEELESYMDTTATGARTKRKCPDVLEQISDNYGPSNIYMGMKKPMINKRKACDIDNIDTGLDIIVSEEDKPLDVKVNMKEEEVLIEMKCPYREYILYDIMDAINNLHIDAHTVDSSTADGVLTFKLKSKFRGAATAPVRMIKEALWKVSGKI

SEQ ID NO: 52241 - protein, 539 aa, Schizosaccharomyces pombe
MEGENDPLLGSYKPKRRRSSLVYGLSRPQFLDTAASEVSPIPQERPTTSLRKPTPRVQRPATDVSYGALEETEENESIASGLSVQEDFNSKAWWKELTLLIKFATPVVLTSLLQYGEVVTTVFSLGHLGKTELAAASLSNMTATITAFAIYQGIVSALDTVGTQSFGSGNYEMVGLHLQRILAILLLIQFPIFLIWWKIEGILLFLRQDPLTCMFAAKYMRVMMLASPAYALFEALKRFLQVQGIFHPVTYILAIVVPINIFLNYLFVWSPWVGFGFLGAPVAVALTLWSACAVLIIYIMKVNGRQAWGGFSREALKNWGPLCRLAVPGVIMICSEYWAFELVTFASGVLGTTELASMSVLSTTSTLSYNLAFGVAAAAATRVGNLIGAGNTKLAKLATHVSINLGAAIGVIIAVILFLTRNTWTYIFTSDKDVVALVATIIPLVALINIADNTQCVAGGLLRGQGRQRIGGVVNFIAYYLLGLPVAIILCFKLDWGLYGLWIGIGAAILIIAGVETWCSLHVNWDHLVELANRQFDEA

SEQ ID NO: 52242 - protein, 509 aa, Lotus corniculatus var. japonicus
NGDIKQMKTVQTMETKADKIGLQRSEQLRELYKFLLVGEADPLAKRPSASLSPEDLSDSEWYYLVCMSFVFYPNQSLPGKALETGETVWLCNAQQADSKFFSRSLLAKSASIQTVVCFPYLGGVIEIGTTELVSEDPNLIQHVKACFLEISKPTCSDKSSSGHDKPHDDHQYPTCTKGDHEGLDKIPMENSCSFAEELKFDEYPGRELQDDDNNEDCDMDGFSDGGCDHYESMIEGINEGGSSQVHFVNEGGDINGAPDSSSSCDCRSEASENHGKKDSKNVIQIQQKELQDCDDNSKSSSLDIGADEVLYYTRTLCAVLGNSSSFAQNLCASKSSFVKWNKGGVSERKWPRLQQMMLKKTLFDVPFMHLSCSSLKLQKENGRKEWTSKLENADNFMGNVFSDKKRESRNIQVLKSVAPSACEVEKISVLGDTIQYLKKLEARVEELESYMDTTATGARTRRKCPDVQEQISDNYGPSNIYMGMKKSRINKRKACDIDDIDTGLDIIVS

SEQ ID NO: 52243 - protein, 302 aa, Oryza sativa (japonica cultivar-group)
MASVTYLDDAHSEVIDPPKNEEMLDVTELVDDHTQHSPKPNAMVSGNVRELLECPVCLNAMYPPIHQCSNGHTLCSGCKPRVHNRCPTCRHELGNIRCLALEKVAASLELPCKYQNFGCLGIYPYYCKLKHESQCQYRPYTCPYAGSECTVAGDIQYLVSHLKDDHKVDMHNGSTFNHRYVKSNPHEVENATWMLTVFSCFGQYFCLHFEAFQLGMAPVYIAFLRFMGDDAEAKNYSYSLEVGGSGRKMTWQGVPRSIRDSHRKVRDSYDGLIIQRNMALFFSGGDKKELKLRVTGRIWKEQ

SEQ ID NO: 52244 - protein, 1238 aa, Synechococcus elongatus PCC 6301
MRWIRPRFSLWQHPQRALIIAVLYGAAGLLWILSTDSLLQTWLRTEVSVWQWSTLKEIFYFFLSAVVLYVLLRQWQILQTLCHANQEQRLQQLLHLLDGNPWPLWLVEPQTLRILDRNAAATAWGNAAYLQELAPRSQLLKQWAENPDALRLSLDLKIPNGQLRSVGLQRCAYPDPGAWLIAARDCGDLQSWQQLTQVGYWELDVQSQLVQTSPLVNRLLGKPSDQCLFSWQQWLEHFQLSDRLRLEQAIDTGMQTGRPIQATYALASDSQDRQLVELRAVIVRDLAGNVRSLRGVLEPKHQAPLTSLEPLPLSLDHPAVLRRILEAIPDPIYIKDYRGEILLQNRACLDLQPFVMPEVIKQEDINDLATIASGLPIINEEWTINPENWPSQHFLISKVPLRNELGQILGLLGIRRNVTRWRRAEQARNALSDQLEQTLAAVSDGVVVLDQNFVVRALNSQAAQQLKKTSEQIIGRVFWDLFPVELGATLQSELQPLQHQSSTRTFELWIDPLSTCWEVNVHRSTAEISLYFRDISDRVMSRQLLEEMAERFQLVTRATNDAVWDRNLLTNEIWYSANYSRLFGGEEKEITQKLVQTVDLQWRDRLDPDQRERIMASLSGAIANGFSTWSEQYRFLRQDGTYAHVLDRGYIVRDENGRAIRAVGAMQDISAIVAANEQLRLWLRAIESTGNSIIIADAQQPDMPIIYVNPAFEKITGFSAAEVIGRNFRFLQGLETQQAELEEMRRALEEGTYCEVTLRSYRKDGSLFWNQISLAPVRDQKGHLTHMVASQTDVSESKAFEEMLLQQATHDALTGLPNRLLFLDRLDQAAARARGGGSPIAVLFIDLDNFKAINDGFSHSEGDAVLQIAAGRLQQCIQEHETVARLSSDEFVILLTDLDVQSKARVKAAMIQSLMAKPFEVMGNPIELTASIGVATFPHDGQSGSELLQAADLAVCAAKQQGKNLWCSFSEAMREQLRSRIDIEKDLRQALIDNSLELYFQPQVDLVTHRLLGFETLVRWNHPERGLVAPGEFIPIAEESDLIDAIGLWVMRAAGLTLRRWIDHEGFTGSLSFNISARQFIRQNIFLKLFDVLQEFQIPPHQLEIELTESSLIESPERFVQWLQEARSMGFQVALDDFGTGYSSLGYLKRLPINALKIDRSFIRDLPHDHDDQAIVQAIVAMAKVLKLRTIAEGVERLEQAAFLEAIGCDAVQGFFYGPPLPEAEALAFLHRSASPGV

SEQ ID NO: 52245 - protein, 3739 aa, Streptomyces venezuelae
MSTVNEEKYLDYLRRATADLHEARGRLRELEAKAGEPVAIVGMACRLPGGVASPEDLWRLVAGGEDAISEFPQDRGWDVEGLYDPNPEATGKSYAREAGFLYEAGEFDADFFGISPREALAMDPQQRLLLEASWEAFEHAGIPAATARGTSVGVFTGVMYHDYATRLTDVPEGIEGYLGTGNSGSVASGRVAYTLGLEGPAVTVDTACSSSLVALHLAVQALRKGEVDMALAGGVTVMSTPSTFVEFSRQRGLAPDGRSKSFSSTADGTSWSEGVGVLLVERLSDARRKGHRILAVVRGTAVNQDGASSGLTAPNGPSQQRVIRRALADARLTTSDVDVVEAHGTGTRLGDPIEAQAVIATYGQGRDGEQPLRLGSLKSNIGHTQAAAGVSGVIKMVQAMRHGVLPKTLHVEKPTDQVDWSAGAVELLTEAMDWPDKGDGGLRRAAVSSFGVSGTNAHVVLEEAPAAEETPASEATPAVEPSVGAGLVPWLVSAKTPAALDAQIGRLAAFASQGRTDAADPGAVARVLAGGRAEFEHRAVVLGTGQDDFAQALTAPEGLIRGTPSDVGRVAFVFPGQGTQWAGMGAELLDVSKEFAAAMAECESALSRYVDWSLEAVVRQAPGAPTLERVDVVQPVTFAVMVSLAKVWQHHGVTPQAVVGHSQGEIAAAYVAGALTLDDAARVVTLRSKSIAAHLAGKGGMISLALSEEATRQRIENLHGLSIAAVNGPTATVVSGDPTQIQELAQACEADGVRARIIPVDYASHSAHVETIESELAEVLAGLSPRTPEVPFFSTLEGAWITEPVLDGTYWYRNLRHRVGFAPAVETLATDEGFTHFIEVSAHPVLTMTLPETVTGLGTLRREQGGQERLVTSLAEAWTNGLTIDWAPVLPTATGHHPELPTYAFQRRHYWLHDSPAVQGSVQDSWRYRIDWKRLAVADASERAGLSGRWLVVVPEDRSAEAAPVLAALSGAGADPVQLDVSPLGDRQRLAATLGEALAAAGGAVDGVLSLLAWDESAHPGHPAPFTRGTGATLTLVQALEDAGVAAPLWCVTHGAVSVGRADHVTSPAQAMVWGMGRVAALEHPERWGGLIDLPSDADRAALDRMTTVLAGGTGEDQVAVRASGLLARRLVRASLPAHGTASPWWQADGTVLVTGAEEPAAAEAARRLARDGAGHLLLHTTPSGSEGAEGTSGAAEDSGLAGLVAELADLGATATVVTCDLTDAEAAARLLAGVSDAHPLSAVLHLPPTVDSEPLAATDADALARVVTAKATAALHLDRLLREAAAAGGRPPVLVLFSSVAAIWGGAGQGAYAAGTAFLDALAGQHRADGPTVTSVAWSPWEGSRVTEGATGERLRRLGLRPLAPATALTALDTALGHGDTAVTIADVDWSSFAPGFTTARPGTLLADLPEARRALDEQQSTTAADDTVLSRELGALTGAEQQRRMQELVREHLAVVLNHPSPEAVDTGRAFRDLGFDSLTAVELRNRLKNATGLALPATLVFDYPTPRTLAEFLLAEILGEQAGAGEQLPVDGGVDDEPVAIVGMACRLPGGVASPEDLWRLVAGGEDAISGFPQDRGWDVEGLYDPDPDASGRTYCRAGGFLDEAGEFDADFFGISPREALAMDPQQRLLLETSWEAVEDAGIDPTSLQGQQVGVFAGTNGPHYEPLLRNTAEDLEGYVGTGNAASIMSGRVSYTLGLEGPAVTVDTACSSSLVALHLAVQALRKGECGLALAGGVTVMSTPTTFVEFSRQRGLAEDGRSKAFAASADGFGPAEGVGMLLVERLSDARRNGHRVLAVVRGSAVNQDGASNGLTAPNGPSQQRVIRRALADARLTTADVDVVEAHGTGTRLGDPIEAQALIATYGQGRDTEQPLRLGSLKSNIGHTQAAAGVSGIIKMVQAMRHGVLPKTLHVDRPSDQIDWSAGTVELLTEAMDWPRKQEGGLRRAAVSSFGISGTNAHIVLEEAPVDEDAPADEPSVGGVVPWLVSAKTPAALDAQIGRLAAFASQGRTDAADPGAVARVLAGGRAQFEHRAVALGTGQDDLAAALAAPEGLVRGVASGVGRVAFVFPGQGTQWAGMGAELLDVSKEFAAAMAECEAALAPYVDWSLEAVVRQAPGAPTLERVDVVQPVTFAVMVSLAKVWQHHGVTPQAVVGHSQGEIAAAYVAGALSLDDAARVVTLRSKSIGAHLAGQGGMLSLALSEAAVVERLAGFDGLSVAAVNGPTATVVSGDPTQIQELAQACEADGVRARIIPVDYASHSAHVETIESELADVLAGLSPQTPQVPFFSTLEGAWITEPALDGGYWYRNLRHRVGFAPAVETLATDEGFTHFVEVSAHPVLTMALPETVTGLGTLRRDNGGQHRLTTSLAEAWANGLTVDWASLLPTTTTHPDLPTYAFQTERYWPQPDLSAAGDITSAGLGAAEHPLLGAAVALADSDGCLLTGSLSLRTHPWLADHAVAGTVLLPGTAFVELAFRAGDQVGCDLVEELTLDAPLVLPRRGAVRVQLSVGASDESGRRTFGLYAHPEDAPGEAEWTRHATGVLAARADRTAPVADPEAWPPPGAEPVDVDGLYERFAANGYGYGPLFQGVRGVWRRGDEVFADVALPAEVAGAEGARFGLHPALLDAAVQAAGAGRGVRRGHAAAVRLERDLLYAVGATALRVRLAPAGPDTVSVSAADSSGQPVFAADSLTVLPVDPAQLAAFSDPTLDALHLLEWTAWDGAAQALPGAVVLGGDADGLAAALRAGGTEVLSFPDLTDLVEAVDRGETPAPATVLVACPAAGPDGPEHVREALHGSLALMQAWLADERFTDGRLVLVTRDAVAARSGDGLRSTGQAAVWGLGRSAQTESPGRFVLLDLAGEARTAGDATAGDGLTTGDATVGGTSGDAALGSALATALGSGEPQLALRDGALLVPRLARAAAPAAADGLAAADGLAALPLPAAPALWRLEPGTDGSLESLTAAPGDAETLAPEPLGPGQVRIAIRATGLNFRDVLIALGMYPDPALMGTEGAGVVTATGPGVTHLAPGDRVMGLLSGAYAPVVVADARTVARMPEGWTFAQGASVPVVFLTAVYALRDLADVKPGERLLVHSAAGGVGMAAVQLARHWGVEVHGTASHGKWDALRALGLDDAHIASSRTLDFESAFRAASGGAGMDVVLNSLAREFVDASLRLLGPGGRFVEMGKTDVRDAERVAADHPGVGYRAFDLGEAGPERIGEMLAEVIALFEDGVLRHLPVTTWDVRRARDAFRHVSQARHTGKVVLTMPSGLDPEGTVLLTGGTGALGGIVARHVVGEWGVRRLLLVSRRGTDAPGAGELVHELEALGADVSVAACDVADREALTAVLDSIPAEHPLTAVVHTAGVLSDGTLPSMTAEDVEHVLRPKVDAAFLLDELTSTPGYDLAAFVMFSSAAAVFGGAGQGAYAAANATLDALAWRRRTAGLPALSLGWGLWAETSGMTGGLSDTDRSRLARSGATPMDSELTLSLLDAAMRRDDPALVPIALDVAALRAQQRDGMLAPLLSGLTRGSRVGGAPVNQRRAAAGGAGEADTDLGGRLAAMTPDDRVAHLRDLVRTHVATVLGHGTPSRVDLERAFRDTGFDSLTAVELRNRLNAATGLRLPATLVFDHPTPGELAGHLLDELATAAGGSWAEGTGSGDTASATDRQTTAALAELDRLEGVLASLAPAAGGRPELAARLRALAAALGDDGDDATDLDEASDDDLFSFIDKELGDSDF

SEQ ID NO: 52246 - protein, 413 aa, Oryza sativa (japonica cultivar-group); identical to SEQ ID NO: 792

SEQ ID NO: 52247 - protein, 900 aa, Ustilago maydis 521
MTREHLTANLKPGPATFHDFAVLVFGCVGGGNAHSQLRSLSAGARCSSDFSHESAYFVPECIHDTLECRIASLALGPALHLSPLLLPPSSHPIGATDYAILRHKAELEVLIITLVRHRNPPSSTLKRTLARFDLVTQQAKIMSTPNNPNPNPNGNGKARAIPSPSLASADTLASTPIRSPSRAFGEGWGHASPSLPNIPPRVGSPSAEPLNLYSSSQQQRQDSSNFPRSFSIEPPSRDSPSLAPPAVDSGLSTPSNLDNLDSLPFSDERKARIIERHLARPDGNRDSISATSIPSSEHTDDFDDSQDAHGSSTPNPAASGDGANESPSEIAFEDVDESYIGPHQMQGGAITDDVYRWAHKNRRVSARRTRSESLHMPRTATIDPELDVQGIKEPGGFRRFFVINQAQEQGRAPPRALRSFIDFLSLYGHFAGEFLEEEDDDDDDDEYEDDADERAIPGTSRGAGTGDMETSGLLRRRKGLQRSDTQARMRKANKERRRGEASVLDAVMMLLKSFVGTGVLFLGKAFHNGGLLFSTVTLCAVAIISLVSFLLLVKTNLNCPGSFGDMGGILYGPRMRLAILASIVLSQLGFVAAYTVFVAQNMQAFVLAVTHCKTLVPIWALILGQMAVFLPLSLIRRIAKLSTTALIADVFILFGIVYLFWYEIGKVAKDGLADVVMFNSKEFPLFIGTAVFTFEGIGLVIPITESMKEPEKFPRALTGVMAGVMVLFASAGALSYMAFGSEIQTVVITNLPQTSRFVQAMQFLYSIAILLSTPLQLFPALAVLEKGIFTKSGKYNWKVKTEKNLFRFLVVVVCCLAAWAGANDLDKFVSLIGSVACVPLCFIYPPLLHLKANATRSATKVLNYAMLVFGVVCVAFAGSQTIKAMLESSQPARPPRCSPR

SEQ ID NO: 52248 - protein, 401 aa, Xanthomonas oryzae pv. oryzae KACC10331
MSKQIQDAYIVAATRTPVGKAPKGVFRNTRPDDMLAHVLRAVVAQAPGIDTSRIDDAIIGCAMPEGEQGMNVARIGVLLAGLPNSVAGQTINRFCSSGIQAIAMAADQIRLGNADLMLAGGTESMSMVPMMGNKVAMSPSVFADDHVAIAYGMGITAEKVAEEWKVSREDQDAFALASHQKAIAAIAAGEFRDEITPYEIHSHQPDLAGNVIALRKHLVDTDEGPRPDSSLEGLAKLRPVFRNGQFGGSVTAGNSSQMSDGAGAVLLASEQAIKDYGLTPLARFVSFSVAGVRPEVMGIGPIAAIPKALKQAGMTKGQIDWIELNEAFAAQALAVIRDSELDPSKVNPLGGAIALGHPLGATGAIRAATLVHGLRRLQQKYGMVTMCIGTGMGAAGIIEAL

SEQ ID NO: 52249 - protein, 381 aa, Kluyveromyces lactis NRRL Y-1140
MQIFVKTLTGKTITLEVESSDTIDNVKSKIQDKEGIPPDQQRLIFAGKQLEDGRTLSDYNIQKESTLHLVLRLRGGMQIFVKTLTGKTITLEVESSDTIDNVKSKIQDKEGIPPDQQRLIFAGKQLEDGRTLSDYNIQKESTLHLVLRLRGGMQIFVKTLTGKTITLEVESSDTIDNVKSKIQDKEGIPPDQQRLIFAGKQLEDGRTLSDYNIQKESTLHLVLRLRGGMQIFVKTLTGKTITLEVESSDTIDNVKSKIQDKEGIPPDQQRLIFAGKQLEDGRTLSDYNIQKESTLHLVLRLRGGMQIFVKTLTGKTITLEVESSDTIDNVKSKIQDKEGIPPDQQRLIFAGKQLEDGRTLSDYNIQKESTLHLVLRLRGGI

SEQ ID NO: 52250 - protein, 234 aa, Triticum aestivum
  misc_feature (142)..(142): Xaa can be any naturally occurring amino acid
  unsure (1)..(234): unsure at all Xaa locations
MGPCGRVVPHSGRVPPPIPGAHGRRPPRVGGQDLALDRRGGHTPAPPLSEGSTYLDHTGPLPIGLAATSVAPFQGLKSTAGLPVSRRLPTALASGSVSNGGRIRCMQVWPIEGIKKFETLSYLPPLSTEALLKQVDYLIRSXKWVPCLEFSKVGFIFREHNASPGYYDGRYWTMWKLPMFGCTDATQVINEVEEVKKEYPDAYVRIIGFDNMRQVQCVSFIAFKPPGCEESGKA

SEQ ID NO: 52251 - protein, 349 aa, Methanothermobacter wolfeii
METTEVIEGKNITVERTGEENRRLIFQDCLCAVCGLCGEICPVSAIEVNPTGAMVRTEQEKSKIAIDENKCVLCGMCSSICPFQALDLQIDGTSIKELAEYPKIIKSAEIDDETCIQCKACETACPQDAITITRELPERKDLVTGEIEIDKDTCIYCGMCEEMCPVDAIEIDHQTPSSASPVVATDIRVDEDKCVHCGICKRICPVDAIMQVCRICPYGEYEIKTPEVTGTSYIDPELCVNCGWCQEICPVDAATVTKPFEGELIIDQDTCQACETCVMVCPCNVLSFPKPEKPGEKTTKLHKDERFCIYCGACERSCPVTAITVKRNRINTTPIRSKAWKNAFDSLLK

SEQ ID NO: 52252 - protein, 447 aa, Chlorobium limicola
MADPNHRNSLTITDNRTGKSYELPIENGTVRTMDLRQIKASEDDFGLLGYDPAFLNTCSCKSQITFIDGEKGILRYRGYPIEQLAEKSSFLETAYLLIKGELPDKERLAVWTYNIRHHTMTHANLTKFMDGFRYDAHPMGILVGTVGALSTFYPDAKQVSEEESRKLQVRRLIGKIPTLAAMSFRHSLGFPYVLPDNDLSYAGNFLSMMFRMTEQKYEPNPVLEKALDVLFILHADHEQNCSTNAVRSVSSSMVDPYSAIAAGCAALYGPLHGGANEAVIRMLEGIGSVDNIPAFIKSVKSGEGRLMGFGHRVYKNYDPRARIIKKIAFEVFEETGRNPLLDIAIELERIALEDDYFVGRKLYPNVDFYSGLIYQAMGFPTDMFPVLFAIGRTPGWLAQWIEHVKDPEQRIARPRQIFLGAPCRDYVPLDERPSRGDDEEKFGICRL

SEQ ID NO: 52253 - protein, 305 aa, Escherichia coli O157:H7 EDL933
  misc_feature (23)..(23): Xaa can be any naturally occurring amino acid
  unsure (1)..(305): unsure at all Xaa locations
MSAKVWVLGDAGRRSLARIRRAXYCLVLAARQLTLPVGIARLGGTSGFIGRVGDDPFGALMQRTLLTEGVDITYLKQDEWHRTSTVLVDLNDQGERSFTFMVRPSADLFLETTDLPCWRHGEWLHLCSIALSAEPSRTSAFTAMTEIRHAGGFVSFDPNIREDLWQDEHLLRLCLRQALQLADVVKLSEEEWRLISGKTQNDRDICALAKEYEIAMLLVTKGAEGVVVCYRGQVHHFAGMSVDCVDSTGAGDAFVAGLLTGLSSTGLSTDEREMRRIIDLAQRCGALAVTAKGAMTALPCRQELE

SEQ ID NO: 52254 - protein, 478 aa, Oryza sativa
MAGAAAASAAAAAVASGISARPVAPRPSPSRARAPRSVVRAAISVEKGEKAYTVEKSEEIFNAAKELMPGGVNSPVRAFKSVGGQPIVFDSVKGSRMWDVDGNEYIDYVGSWGPAIIGHADDTVNAALIETLKKGTSFGAPCVLENVLAEMVISAVPSIEMVRFVNSGTEACMGALRLVRAFTGREKILKFEGCYHGHADSFLVKAGSGVATLGLPDSPGVPKGATSETLTAPYNDVEAVKKLFEENKGQIAAVFLEPVVGNAGFIPPQPGFLNALRDLTKQDGALLVFDEVMTGFRLAYGGAQEYFGITPDVSTLGKIIGGGLPVGAYGGRKDIMEMVAPAGPMYQAGTLSGNPLAMTAGIHTLKRLMEPGTYDYLDKITGDLVRGVLDAGAKTGHEMCGGHIRGMFGFFFTAGPVHNFGDAKKSDTAKFGRFYRGMLEEGVYLAPSQFEAGFTSLAHTSQDIEKTVEAAAKVLRRI

SEQ ID NO: 52255 - protein, 545 aa, Methylococcus capsulatus str. Bath
MAAKEVKFSDDARTRMLRGVNILAHAVKVTLGPKGRNVVLEKSFGAPTVTKDGVSVAKEIELSDKFENMGAQMVKEVASQTSDVAGDGTTTATVLAQSILTEGLKAVAAGMNPMDLKRGIDKAVAAAVDEIHAMSVPCTDSNAIAQVGTISANADESIGKIIAEAMDKVGKEGVITVEDGSGLENQLDIVEGMQFDRGYLSPYFINNQQSMSAELENPFILINEKKISNIRELLPVLEGVAKAGRPLVIVAEDVEGEALATLVVNNMRGILKVAAVKAPGFGDRRKAMLEDIAVLTGGTVISEDIGLSLEKATLADLGTAKKVQITKENTTIIDGAGSSEAIQGRVAQIRKQIEDTTSDYDREKLQERLAKLAGGVAVIKVGAATEVEMKEKKARVEDALHATRAAVEEGIVPGGGVALIRALAKLRDLKGANHDQDVGISIARRAMEEPLRQIVANAGDEPSVVLNKVAEGAGNFGYNAATGEYGDMVAMGILDPAKVTRSALQNAASVASLMITTEAMVAEEPKEEAPMPGGMGGMGGMGDMM

SEQ ID NO: 52256 - protein, 150 aa, Arabidopsis thaliana
MAPRAEKKPAEKKPAAEKPVEEKSKAEKAPAEKKPKAGKKLPKEAGAGGDKKKKMKKKSVETYKIYIFKVLKQVHPDIGISSKAMGIMNSFINDIFEKLASESSKLARYNKKPTITSREIQTAVRLVLPGELAKHAVSEGTKAVTKFTSS

SEQ ID NO: 52257 - protein, 96 aa, Methylococcus capsulatus str. Bath
MKIRPLHDRVIIKRLEEERTSAGGIVIPDSAAEKPMRGEILAVGNGKVLDNGEVRALQVKVGDKVLFGKYAGTEVKVDGEDVVVMREDDILAVLES

SEQ ID NO: 52258 - protein, 625 aa, Lactococcus lactis subsp. lactis Il1403
MCGIVGFIDRMNQNDKSKTLEEMMNTIGHRGPSSSGEFIDEGAAIGFRRLSIIDLEGGDQPIFNEDKSKLITFNGEIYNFRELREDLIAKGHDFTTHADTEVLLHGYEEYGVELLQKLRGMFAFVIWDREKQELFGARDHFGIKPLYYTQMGGTFMYGSEIKSFLKHPNFKKELNKEALKPYMTFQYSALDETFFKNVFRIKEGHYFTYKDGVLDIKPYWDMKVDEKDMSLEESIDLIDKTVLGSVDAHKFADVEVGAFVSSGVDSSYVASTLRPEHTYSIGFGQGTFNESKQAKQLTDMIGLNNTSREIHGDEAFKYFPQIQYYLDEPDSNPSCVPLFFLAELAARDVRVVMSGEGADELFAGYESYGFSTNSRAVRVFAEGLKKLPKSLRFSIARGIENKHFKGQKHLYESLAPAEDFFIGQAKVFDESESVELLKEEFKAAPTVKDIVGKTYKKAPEGSELRKMQYLDMHQWMPGDILLKADKMAMAHSLELRVPLLDIELMHTAEQIPTKYLLNEHNTKYAFRQAARRHLPEEWSNRKKLGFPVPIKDWLREEKYYKVVRQLFEQDFVAEFFDQEKLLKMLDDNFADKNDARRKLWTIYSFLTWYDVYFINNGEKPAVVNF

SEQ ID NO: 52259 - protein, 588 aa, uncultured archaeon GZfos3D4
MVDVIRMNMAFHKGGETERAIFKWLRENKKGMTKNVAVLGDLPGPKIRLGGVGGAIKVSKGEHFDLYFRKRNEVSKSKRAGASVLVNDKPFEEVVKKINEYDGIGDYIGESIRNNKDVVISIADGSVILKAVGESEGVVECEVEKEGEIKDHKGVTIKRAELDAPSFEQRDKEALRFLLDEGGDFLGFVGVSFVKDAEDVLKVRKYIEDYFFEKLKKEIKGKSFEEIKNILTFEPASRAEEKGALRKEARLRAPAVIAKIETKQAWRNIDEIIDVADGIMVARGDLGLQVDPQEVPSIQKKIIKLCNLRGKPVITATEMLSSMENNPEPTRAESTDVFNAILDGTDAVMLSGETSSGKYPAHAVRMMVNIAEQAEEYFEQKGLSTDLRKSLDTRRFEEISSGSASLLNDKERRFESRIYEAAVKIPDTTGKEKEWYQWIEDFYSQKLLNRKRQRIMDSISESSCILSLSEEGDGEGENAAIVASTLTGRTARMISRFRPSIKAIIGVVHDIHTAKKLVLSSGVYPLNIGKEKNGEKYSNMDEMFEEALKLATEEGRVQRGDKVIFIGGTPLWTVEEANLIQIHAYSVK

SEQ ID NO: 52260 - protein, 466 aa, Gloeobacter violaceus PCC 7421
MTRNVLPSTEVPWRVGAVSIWNAGEHAQNQSKLQLLRSTKGEYLMLPARRVVVTGMGTVNPIGKSVNEFWENCCKGVSGVKVVSDFAIADSQSQIAGVVEDFDFWEYFPQNDLLGVDRSCIFALVAAKEALESAGLGESFLKSLSPGKCRLLMSTAAAQIASMEKDFLASLGDETLALHRPRATPGVVHFNATAKTLANQFGIPGECLTVTTGCTGALDAMGYAMDLIRLGKMDLAVVGGAEAPITPICMAAFSKIGATTSRNAEPQKASRPFDMGRDGFVLAEGSGMLVIEALDHALLRGAPIFAELGGYGSLNNFYHMTKMPENGLQLAQSARTAIEDAGISPDEIDSINAHGSSTPQNDIAEANAYWRLFQERTPTIPVTCIKSHIGHTLAASSAIEVIASIMSMRTGIVPPTINLVKQDSRCMLDVVADEPRRASVRCTLKTSSGFSGIHSSLVIRKFEHRN

SEQ ID NO: 52261 - protein, 576 aa, Neurospora crassa
MSDIRTQSLQKPVTVAEYLFRRLHQIGIRSVHGLPGDFNLVALDYVPKAGLKWVGSVNELNAAYAADGYARAKGISALVTTFGVGELSAINGVAGAYSEHVPIVHIVGCPSTISQRNGMLLHHTLGNGDFHVFANMSENISCDVAKLVKPSEIAYQIDHAIRECWIRSRPVYIWLPTDMVEKKIEGARLDTEIDLSEPENDPDREDYVVDVVLRYLHGAKNPVVLVDACAIRHRVTEEVKRFIEKTKLPVFVTPMGKGAFDETSEHYGGVYAGTGSLPEVAKRVEGSDLVLSIGAIKSDFNTAGFSYHTSQLNTIDLHSDHCTVRYSEYPGVAMRGVLRKVTERIDMSKLSITPSPPVENAVAENRDDSQAITQAWFWPRVGEYFQEGDVVVTETGTANFGIWESRFPKDVMGVTQVLWGSIGWSVGAAQGAALAVKDLEQDRRTILFVGDGSFQLTCQEVSTMLKHNLRVTIFLIYNEGYTIERYIHGMDADYNDVTRWNYTDIPAVFGAKEGQSQKFVIKTKDELERLLKDKDFNEYKGLQFVELWMPKDDAPRALKLTAEISARTNSRIEDEQ

SEQ ID NO: 52262 - protein, 266 aa, Fusobacterium nucleatum subsp. vincentii ATCC 49256
MSRIFQENKIEAVMHFAGYIRVPESVDDPNKYYFNNTYTTMCLIQSMVKHNVKNIIFSSTAAVYGEIIEDQPIDEKHSTVPINPYGASKLMSERIILDCAKAYGLNYSIFRYFNVAGAHEKYPIGQKGEGVTSLITLTLQAAKDSNRVLEVFGDDFPTKDGTGIRDYIHVVDLVKAHVLSLKLLFKNESNIFNLGNGNGFSVLETVEAARKVTCKKISYKITGRRKGDPACVIASSKKAQKLLGWKTQYTNVEKIIETGWHFVENL

SEQ ID NO: 52263 - protein, 877 aa, uncultured archaeon GZfos3D4
MRDMAKERKEEKDTIYLVPNAHFDALWVFTKEEHLYINLMLVLKEVAELVEKTDFKFLIEQTYLLEEMEKRCPELYTKIARHITNGDIEIADGEYLMADTMLPEGETLIREIMDGKRYAKKKFGVDVPVMWQADSFGLNAQLPQIYKKSGYRYVAFRRGVSKRKPSEFLWEGLDGTRILTHWMSLGTRAGLYLTLPKLEESYEKLKELAATSHILMPSGDEVTVPQPQMPDAVREWNDKKGKVARMKIATSREFFEALEKEAEAGDIEFEVRKGEKYSGEYTEVFPSCCSSRIWLKQELRDYESWLSCCEHWGTISFLLNGYYPFDEFESCWRKMLFLAFHDVIPGTGMDRGYEEVKQYLSYLKTTLSPLSPNTLSKITEKEAEGGVERGDIIVFNSLSWEVRNWVEMELNFKEGEIEAIKGLKSGKEEIDVEVIKFARYEDDSVKYAKIGFVPTVPAMGYKTYKIIEREPKRHPYDPNFIMIRGNTVENRFFGVEVDSDTGLIDVIQKEDGGKREKICTANELVLEQEIGDLYHHRQTLDIPLKTETGEGVYFGAFRVENFWIDKSPLRRVINVETNYFSLRWPYRLKEEIEPIMWRHRAMECVKKIIVYRDIPRIDFITEIEDKHPKARIRVKFSTDIKSAEYSCGTQFGVVSRPTDLCYYKPKPGEEWEEEPSGIFPSLKWLDYSDGKKGLTVIHRGIPENEVKDGDVYLTVLRSVSMLSTDGISGPAIPVPDARELNKRYEFRYAVYPHEGDWREASSYKHAIEFNTDLDTLQLPKGMKLPLNRSFLKIDPGNVVLSALKRAEDGDGVILRFYETKGEETNAEITLFREPKAVKTANMLEEEDEGVKKELKTEGERIELKMKPFEIVTLKVEV

SEQ ID NO: 52264 - protein, 518 aa, Crocosphaera watsonii WH 8501
MQDITRRVGNVSTDFKIVNSWVVILPTLLIVNCTLLNYNLSSMTNSVIFWHRRDLRVSDNIGLSKAYQHSSKLVGLFCLDTDILNQDNVAPARITYMLGCLQDLRESYQQLGGQLLIFQGNPTQIIPQVADALKVDCVFWNNDVEPYSKKRDNQVIEALQERGIHSQTYWDQLLHAPGDILTKSNNAPYKVYTPFWRSWLKEEKANIAQALGKLESLSEEEINTVKNLGIIDLPTAKDLGYSWDAPLILEPGETAAKEQLNYFCDSLIYNYQEQRNYPGINGTSTLSPAFKFGVIGIREVWQATLSAYENTYSDEARENIQTWQQEIAWREFYQHCMYFFPELATGPYRQEFKDFSWDNNEQHFQAWCEGKTGYPIVDAAMRQLNETGWMHNRCRMIVASFLTKDLIINWQWGEKYFMQKLIDGDLSANNGGWQWSASSGMDPKPLRIFNPASQAQKYDPDGEYIRLWVPEISSLDTEYLVTGKIPPLEAHSCGYLQPIVDHKQQQREFKERYKQIKN

SEQ ID NO: 52265 - protein, 268 aa, Gloeobacter violaceus PCC 7421
MNRIANTAQIQSAPPVFARPLENKVAIVTGASSGIGRATALELARRGAKVVASARRVGPTLELVEAIRAEGHEATFVQADVTDEAYVERLVAEAIATYGKLDIAFNNAGTEGVFAPLLEQTKETYDLVFDANVRSVFYSMKHQAQAMLCAGGGVIVNNASMGGVIGFENAALYIATKHAVLGMTKSAALEWYRRGVRVNAICPGIIDTPFQDRIWPSTEAKNSFANATVAGRAGTAEEMAKVVAFLVSEDASFVSGHGLLADGGYSIA

SEQ ID NO: 52266 - protein, 333 aa, Gloeobacter violaceus PCC 7421
MRVVQFRVFGGSEVLEVADAVLPQPHRGEIAVDVRYAGVNFADIMLRRGALAGTPLPTVPGLEVAGTVAEIGPGVSGFAYGEPVAAFSWTPGKAMGGYAQRVVLDSRLAVPLRRAERELRYEEGAGFACAAVTAYQLLADVARLRPGETVLVQSAAGGVGSLAVQFARALGAARIFGVVGSASKTEAALAAGCDRVVLREGWIEAVRSFTGGRGVDIALESVGGDSLAACLQVLAPFGRVAYFGDASGSGPISLPAFDLWFGTKGVLGYNIGGLAAASPESWNGAANRAIELIANGAVRLAPTRIYPLERAAEAQHALETRASTGKMLLQVTS

SEQ ID NO: 52267 - protein, 232 aa, Oryza sativa (japonica cultivar-group)
MGAREYYDYRRAIYGDITHKAILVDAAGTLLAPTEPMAQVYRTIGEKYGVNYSEDEILMRYRRAYAQPWGRSRLRYVDDGRPFWQHIVSSSTGCSDLQYFEELYQYYTTAKAWQLCDPDAKYVFEALRKAGVKTAVVSNFDTRLRPLLQALNCDHWFDAVAVSAEVAAEKPNPTIFLKACEFLGVKPEEAVHIGDDRRNDLWGARDAGCDAWLWGSDVYSFKEVAERIGVKV

SEQ ID NO: 52268 - protein, 311 aa, Agrobacterium tumefaciens str. C58
MATRLYEHPIFLEHITPEGHPERPDRLRSLNIALEHPNFERLDRKEAPQANEDAVLLAHPEEHLLAVMRQVPEEDGEINRIESDTYLSPKSLQAALTGIGAAMAAVDDVFSGAADNVFVAARPPGHHAETAKAMGFCLFNNVAIAARHAQKAHGAERIAIIDWDVHHGNGTQDIFWNDISVLFCSTHQMPLYPWSGDKNETGVKNNIVNAPLSPNTGSDHFREAFKSRVLPAIADFSPDLILISAGFDAHHRDPLAQINLVGEDFDWATGRLLEMADKYASNRVVSLLEGGYDLEGLAESAAMHILRMMKG

SEQ ID NO: 52269 - protein, 330 aa, Rhodobacter sphaeroides 2.4.1
MSLMKALVCVEPGRFEQQDRPRPEAKPGHIRIRILQVGICGTDYHIYGGHQPFLAYPRIMGHELSGRAMEASADGRIAEGDLVVINPYLTCGTCRACRAGKPNCCENIAVLGVHTDGGMCEEIVVPEGNVYGAEGLTEQSAAMVEFLAIGAHGVRRGGVRAGSAALVVGAGPIGIGAALFAAIEGAAVTLRDTSASRLALAQKVLLEARIELVGEEAAEVYDTVFDATGNIRAMNAGLQYVGHGGAYVLLSVVKGDLSFADPEFHKREATLFASRNALKKDFEHVIAQIRNGRVPVEALATHATSFEDAVTNLPLWAEDRGTLIKAIIRV

SEQ ID NO: 52270 - protein, 274 aa, Hyoscyamus niger
MAGESEVYINGNNGGIRWSLKGTTALVTGGSKGIGYAVVEELAGLGARVYTCSRNEKELQQCLDIWRNEGLQVEGSVCDLLLRSERDKLMQTVADLFNGKLNILVNNAGVVIHKEAKDFTKEDYDIVLGTNFEAAYHLCQLAYPFLKASQNGNVIFLSSIAGFSALPSVSLYSASKAAINQITKNLACEWAKDNIRVNSVAPGVILTPLIETAIKKNPHQKEEIDNFIVKTPMGRAGKPNEVSALIAFLCFPAASYITGQIIWADGGFTANGGF

SEQ ID NO: 52271 - protein, 442 aa, Thermotoga neapolitana
MIGYQIYVRSFRDGNFDGVGDFKGLKGAISYLKELGVDFVWLMPVFSSISFHGYDVVDFYSFKAEYGDEKDFREMIEAFHDNGIKVVLDLPIHHTGFLHTWFQKALKGDPHYRDYYVWASEKTDLDERREWDNERIWHPLEDGRFYRGLFGPLSPDLNYDNPQVFEEMKKVVYHLLEMGVDGFRFDAAKHMRDTLEQNVRFWRYFLSDIEGIFLAEIWAESKVVDEHGRIFGYMLNFDTSHCIKEAVWKENFKVLIESIERALVGKDYLPVNFTSNHDMSRLASFEGGLSEEKVKLSLSILFTLPGVPLIFYGDELGMKGIYRKPNTEVVLDPFPWSENISLEGQTFWKWPAYNSPFSGVSVEYQKKKRDSILLHIMKWTGFRKENHWLDRANIEFLCKEEKLLHVYRLVDEGRSLKVIHNLSNGEMVFEGVRVQPYSTEVI

SEQ ID NO: 52272 - protein, 244 aa, Liquidambar styraciflua
LATTEFPNQSSEGSSSQKKMGRGKIEIKRIENTTNRQVTFCKRRNGLLKKAYELSVLCDAEIALIVFSSRGRLYEYANNSVKSTIERYKKASDTSNPGSVSETNAQFYQQESSKLRRQIRDIQNLNRHIMGEALSSLTFRELKNLEGRLEKGISRIRSKKNELLFAEIEYMQKREIELQNANMYLRAKIAENERNQQQTELMPGSVYETMPSSQPYDRSFLVANLLEPPNHHYSRQDQTPLQLV

SEQ ID NO: 52273 - protein, 70 aa, Brassica napus
  misc_feature (42)..(42): Xaa can be any naturally occurring amino acid
  unsure (1)..(70): unsure at all Xaa locations
MGTYLSSPKTEKLSEEGENDTLRYGLSSMQGWRATMEDAHAXILDVDDKTSFFGVYDGHGGKVVAKFCAK

SEQ ID NO: 52274 - protein, 428 aa, Staphylococcus aureus
MRYTKSEEAMKVAETLMPGGVNSPVRAFKSVDTPAIFMDHGKGSKIYDIDGNEYIDYVLSWGPLILGHRDPQVISHLHEAIDKGTSFGASTLLENKLAQLVIDRVPSIEKVRMVSSGTEATLDTLRLARGYTGRNKIVKFEGCYHGHSDSLLIKAGSGVATLGLPDSPGVPEGIAKNTITVPYNDLDALKIAFEKFGNDIAGVIVEPVAGNMGVVPPIEGFLQGLRDITTEYGALLIFDEVMTGFRVGYHCAQGYFGVTPDLTCLGKVIGGGLPVGAFGGKKEIMDHIAPLGNIYQAGTLSGNPLAMTSGYETLSQLTPETYEYFNMLGDILEDGLKRVFAKHNVPITVNRAGSMIGYFLNEGPVTNFEQANKSDLKLFAEMYREMAKEGVFLPPSQFEGTFLSTAHTKEDIEKTIQAFDTALSRIVK

SEQ ID NO: 52275 - protein, 557 aa, Arabidopsis thaliana
MLDSDTDTDSGPVVATTKLVTFLQRVQHTALRSYPKKQTPDPKSYIDLSLKRPYSLSTIESAFDDLTSESHDQPVPVETLEKFVKEYFDGAGEDLLHHEPVDFVSDPSGFLSNVENEEVREWAREVHGLWRNLSCRVSDSVRESADRHTLLPLPEPVIIPGSRFREVYYWDSYWVIKGLMTSQMFTTAKGLVTNLMSLVETYGYALNGARAYYTNRSQPPLLSSMVYEIYNVTKDEELVRKAIPLLLKEYEFWNSGKHKVVIRDANGYDHVLSRYYAMWNKPRPESSVFDEESASGFSTMLEKQRFHRDIATAAESGCDFSTRWMRDPPNFTTMATTSVVPVDLNVFLLKMELDIAFMMKVSGDQNGSDRFVKASKAREKAFQTVFWNEKAGQWLDYWLSSSGENQNTNVFASNFAPIWINSINSDENLVKKVVTALKNSGLIAPAGILTSLTNSGQQWDSPNGWAPQQEMIVTGLGRSSVKEAKEMAEDIARRWIKSNYLVYKKSGTIHEKLKVTELGEYGGGGEYMPQTGFGWSNGVILAFLEEYGWPSHLSIEA

SEQ ID NO: 52276 - protein, 629 aa, Prochlorococcus marinus str. MIT 9313
MIKTPLRMETELGDFIEAAGLLEYDPAAITRIYAGHPQRLLRRLWQTLLPIGLFLVGLAGDKVFGLLNDANRARSRAREFAELLVELGPAFIKAGQALSSRPDLVPPVLLEELSQLQDQLPGFDSVMAMACIEEDLETPIEEIYEQLDKEPISAASLGQVHRGVLKGGQQVAVKVQRPGLREQITLDLYIVRNIAAWLKSNVRLIRSDLVALIDELGRRVFEEMDYLNEAANAERFRTLHSHNQRIAVPIIYRQATSRRVLTMEWIDGVKLTNLKAVRELGIDPNNMVEVGVNCSLQQLLEHGFFHADPHPGNLLAMADGRLCYLDFGMMSEVSRESRTGLIEAVVHLVNRNFKNLSRDFVKLGFLAEDVNLEPIVPAFESVFSQALEMGVSRLDFKSVTDDLSGVMYRFPFKVPPYYALIIRSLITLEGIALSVDSEFKILGAAYPYFARRLMEDPDPQLRQSLKEMLFDGEIFRWTRLENLVASAASQAQLDLESLIDQVIDFLFSINGGLLREQLVEALINRLDAFGWQTFQRLGRNLPRSLQPPLIAIGSESENSDDGSLLDLEPIRQLIVILQNLPDFTPELVLSRLPRLIREPDTHKMGIKVAQGLAERGVVRLVKVAAGISP

SEQ ID NO: 52277 - protein, 444 aa, Pseudomonas aeruginosa PAO1
MTMNDEPQSSSLDNFWMPFTANRQFKARPRLLESAEGIHYIAQGGRRILDGTAGLWCCNAGHGRREISEAVARQIATLDYAPPFQMGHPLPFELAARLTEIAPPSLNKVFFTNSGSESADTALKIALAYQRAIGQGTRTRLIGRELGYHGVGFGGLSVGGMVNNRKAFSANLLPGVDHLPHTLDVARNAFTVGLPEHGVEKAEELERLVTLHGAENIAAVIVEPMSGSAGVVLPPKGYLQRLREITRKHGILLIFDEVITGFGRVGEAFAAQRWGVVPDLLTCAKGLTNGSIPMGAVFVDEKIHAAFMQGPQGAIEFFHGYTYSGHPVACAAALATLDIYRRDDLFQRAVELEGYWQDALFSLRDLPNVVDIRAVGLVGGVQLAPHADGPGKRGYDVFERCFWEHDLMVRVTGDIIAMSPPLIIDKPHIDQIVERLAQAIRASV

SEQ ID NO: 52278 - protein, 299 aa, Zea mays
MGEAASAVAASKRGGGGPAPFLTKTHQMVEERGTDEVISWAEQGRSFVVWKPVELARDLLPLHFKHCNFSSFVRQLNTYGFRKVVPDRWEFANDNFRRGEQGLLSGIRRRKSTALQMSKSGSGGSGGVNATFPPPLPPPPPASATTSGVHERSSSSASSPPRAPDLASENEQLKKDNHTLSVELAQARRHCEELLGFLSRFLDVRQLDLRLLMQEDVRAGASDDGAQRRAHAVASQLERGGGEEGKSVKLFGVLLKDAARKRGRCEEAAASERPIKMIRVGEPWVGVPSSGPGRCGGEN

SEQ ID NO: 52279 - protein, 1015 aa, Synechococcus elongatus PCC 6301
MKADTAAIAALVTLLRRQTEVDLQPHWRLAPATVQAEGCLIAQGFETWSIAERNEKQHIAWPRGQKTLWLACCWTIPDRCDRWPVADMALRLALTWWAEAAEVYVDGQLVQTGDLFDCSSRVLLRDMAQPGDRLQLLLRLVSPGHDDGALVRSQLIFESSTDLPELSFLGQELAVVNSFAEQLQPELLPKLEAIAQSFADLDCSQADTADRLARLRDQLAAIAAPIRQRRVSLLGHAHLDLAWLWPVAETWEAAQRTFESVLQLQAAFPELTFGHSTPALYEWIERNRPDLFVAIQAQIAAGRWEVNAGPWVEPELNLVSAESLVRQLLYGQRYSTETLGVQNRVAWLPDSFGFCWQLPQLLQQAGIDTFVTQKLRWNDSTQFPHGLFRWRSPDGSEVLALMSAPIGTGIDPEAIANYSWEWEQQTGSQESLWLPGVGDHGGGPTRDMLEQARRWQQSPCFPQLQFETLTAYLERLGDRDRLPVWNNELYLEFHRGCYTSHADQKAYNRQAETALYSAEVWASFASLLTGADYPKVNLEAAWKATLFNQFHDILPGSAIPEVYADADPEWQQAIATAHQVKSEALTAIAAHIAWTAPPRSTAQPWLIFNDLPGDRSTVIAIDGHWRIFDLSGQELPSQFTPTETLVAVTVSGMGWLGLWREAAIATIQAIDPTAPLHLSNDWLSAEIDPETGDLLQLRDRQGRELLDGQGNQYQRFQDQGQYWDAWNIDPAYEQHPLPSPELQSLTWLEQGPLRWRLRRILSCDRSTITQDYVLTVADPWLKLETTIDWQQRHELLKVAFPTTVSAPVATYEMAAGAIARARQPQTPAEAAQWEVPALRWADLSDLQGGLAILNDCKYGYDCRDRQLRLTLLRGSTWPDPQADLGQHQFAYAIYPHPDSWQAAGVAPLARRLNQPLTGQPAPFAQGALQPSQTLLNWNADQLLPLALKRSETGDRWLLRCYEAIGQTAELVLTGDRTWQIGARLDGLEQPLSSSSTEVQPWQIASFELLQPTQEN

SEQ ID NO: 52280 - protein, 306 aa, Salmonella enterica subsp. enterica serovar Typhi Ty2
MDIAVIGSNMVDLITYTNQMPKEGETLEAPAFKIGCGGKGANQAVAAAKLNSKVLMLTKVGDDIFADNTIRNLESWGINTTYVEKVPCTSSGVAPIFVNANSSNSILIIKGANKFLSPEDIDRAAEDLKKCQLIVLQLEVQLETVYHAIEFGKKHGIEVLLNPAPALRELDMSYACKCDFFVPNETELEILTGMPVDTYDHIRAAARSLVDKGLNNIIVTMGEKGALWMTRDQEVHVPAFRVNAVDTSGAGDAFIGCFAHYYVQSGDVEAAMKKAVLFAAFSVTGKGTQSSYPSIEQFNEYLSLNE

SEQ ID NO: 52281 - protein, 122 aa, Xanthomonas oryzae pv. oryzae KACC10331
MIRVLRLHRNRPMKHMVLVTGGSDYVACRLVKQLLEAGDTVHATVRSLRAWPKLRPLGQDHPDQLLLFEADLLVPGSFADAMQGCSVVHHLASPFLMSEKIKNGRTQLLEPALQGVRNVLAK

SEQ ID NO: 52282 - protein, 410 aa, Halobacterium sp. NRC-1
MRAAGSRPVNRWLDVGRCGSFKERGALAFGMAATTTPVIAAAYRTPQGKDGGVYADTRSEDLSVTVIDHILAETGLTGDHIDDLQWGVAQQRTEQDNNVARVIALLSELGENVPAASINRWCASSMEAIMRAADAVRAGQRDAVIAGGVENMSRVPMDGDSYAHLHPGLSEQYNVPELEMGMTAEEVAERHGITRTEQDEYALQSQRRAAEATDAGRFDDEIVPVQTDSGLVEEDEGIRPDTTLEALGELPTVFKSDGSVTPGNASQISDGAAATLVTSEAFARDHGLDVLARVGDHNVAGVNPEVMGIGPVPATRGLLDRTGEDIDEFDLVELNEAFASQTLYSRDELGIDNDRFNVNGGAIAVGHPLGASGARLPVTLIHEMNKRDAGKALATLCVGFGQGAAISFER

SEQ ID NO: 52283 - protein, 541 aa, Oryza sativa
  misc_feature (497)..(497): Xaa can be any naturally occurring amino acid
  misc_feature (511)..(511): Xaa can be any naturally occurring amino acid
  unsure (1)..(541): unsure at all Xaa locations
MTTVASLSLLPHLLIKPSFRCCSRKGVGRYGGIKVYAVLGDDGADYAKNNAWEALFHVDDPGPRVPIAKGKFLDVNQALEVVRFDIQYCDWRARQDLLTIMVLHNKVVEVLNPLAREFKSIGTLRKELAELQEELAKAHNQVHLSETRVSSALDKLAQMETLVNDRLLQDGGSSASTAECTSLAPSTSSASRVVNKKPPRRSLNVSGPVQPYNPSLKNFWYPVAFSSDLKDDTMVPIDCFEEQWVIFRGKDGRPGCVMNTCAHRACPLHLGSVNEGRIQCPYHGWEYSTDGKCEKMPSTKMLNVRIRSLPCFEQEGMVWIWPGNDPPKSTIPSLLPPSGFTIHAEIVMELPVEHGLLLDNLLDLAHAPFTHTSTFAKGWSVPSLVKFLTPSSGLQGYWDPYPIDMEFRPPCMVLSTIGISKPGKLEGKSTKQCSTHLHQLHICLPSSRNKTRLLYRMSLDFAPWIKHVPFMHILWSHFAEKVLNEDLRLVLGQQERXDQWRKCLELASIIXKLGIRYRLWRDAIERGVDRLPFSNQSESGS

SEQ ID NO: 52284 - protein, 578 aa, Bacillus cereus G9241
MQGIKRYLQFVKPYRWLIAITIMIGLVKFGIPLIMPWLLKYIIDDVIQGGGSLQEKTSQLITAIGIAFFIFAVLRPPIEYYRQYFAQRIANTILYDLRKHIFGHLQKLSLRYYSNTKTGEIISRVIHDVEQTKDFVITGLMNVWLDTATIAIAIIVMFSMNIKLTFVALLILPIYVVAVKYFFGRLRKLTKERSQALATMQGYLHERIQGMQVTRSFALEEYEGKQFEKRNNEFLTKALTHTSWTARTFSAVNTLTDLGPLLVIGFAAYEVVQGQLTLGTMVAFVGYMDSLYSPLRRLVNSSTTLTQSFASMDRVFELLDEKYDIVNVPGAVQTKKLNGEVIFDNVSFRYNSDEKEVLHNLSLTMLPGEKVALVGASGGGKSSLASLIPRFYDVSSGAVYVDGIDVRKYDMRNLRSHIGIVLQDNLLFSDTIGANILYGNPKATEEEVIAAAKAAQIHDFIIELPDGYDTVVGERGVKLSGGQRQRVAIARVFLKNPSLLILDEATSALDLENERYIQEALQTLAADRTTIIIAHRLATITHVDTIIYIEDGEIKETGSHEELMKKEDIITIYINFNI

SEQ ID NO: 52285 - protein, 650 aa, Halobacterium sp. NRC-1
MDPRDAEREYDDHVIARQTLSRTFEDAAERHADSPAQAYKGGVYDRSLAPEVVDPAPDGGVETLSYDALRDIVRTLAAGFRDLGVTAGDRVGVFAHTRMEWAQCDLAVLAAGGAVTTVYASSSPAQIAHLLGDSGAVGVVVENDALRQRVREVESDLDDLEFVATMDTPSDDTRPLSAVYDRGRDAFDPDAYQGWIDDRDPDDLASLIYTSGTTGTPKGVALTHRNFHANLNQSRRRFGPRPDRGDAPAVTSDSRHLSFLPLAHVLERLSGHFLPLASGAQVCYAESPDTLREDFGLFEPTSATSVPRVYEKLYDTIREQAADSPVSERVFEWATRVGRAAHTTDDPGIGLRAAHALADTLVFSDIRDALGGEIEFFISGGGSLSPELCALFHGMGLPILEGYGLTETSPVLAVNPYEDPIVGTIGPPVTDTELTVDETIASPEQRQRCDGAAGELLARGPQVFDGYWGLPDATDAAFVTREGKEWFRTGDVVELRPDGYVRFLERAKQLLTLSTGKNVAPGPIEDAFAASPLVAQAMVVGDGQKFVSAILVPNFDAVSEWAASQEIALPDDRDAICRDERVRARIQSAVDDVNTGFEPYERIKQFRLVATEFTEANDLLTPTMKKKRHHIRDRFADAVGDVYDDSEFST

SEQ ID NO: 52286 - protein, 445 aa, Ajellomyces capsulatus
MREIVHLQTGQCGNQIGAAFWQTISGEHGVDGAGYYNGSLDIQLERMNVYFNEAAEKKYVPRAVLVDLEPGTMDSVRAGPFGQLFRPDNFVFVQSGAGNTWAKGHYTEGSELVDQVIDVVRREAERCDCLQGFQIIHSLGGGTGAGMGTLLISKIREEFPDRMMATFSSVVPSPKVSDTVVEPYNATLSNHQLVENSDETFCIDNEALYDICMRTLKLSEPSYGDLNHLVSAVMSGVTTCLRFPGQLNSDLRKLAVNMVPFPRLHFFMVGFAPLTSRGAYSFRVVTVPELTQKMYDPKNMMCLLDFRNGRYLTASAIFRGKVSMKEVEDQMRNVQNKNHTYFVEWIPNNVQTALCSIPPRGLKMSSTFVENSTAIQELFKRVGDQFTAMFRRKAFLHWYTGEGMDEMEFTEAESNMNDLVSEYQQYQDASISEGEDEYFDYAWAM

SEQ ID NO: 52287 - protein, 452 aa, Prochlorococcus marinus subsp. pastoris str. CCMP1986
MSINEKVPVTILTGFLGSGKTTLLNRILSEEHGKRIAVIENEYGEVGIDQGLVINADEEVFEMSNGCICCTVRGDLIRVLGNLMKRRDKFDYVLVETTGLADPGPVAQTFFMDEEISSEFTLDGIVTLVDAAHIDQQLGRSDESSEQVAFADVLVLNKTDLVSNDALDNLESRLRDMNRMTRIIRAEKADVPIETVLNLSAFDLDQILKRRPTFLEPEYPFEWSGVYELEPGKYELKLEEGPDPEMSLVAFANQGFSEEELKESAEASVRLYAEKAKNLESGNTIPYDEHVSLKLQNKGSKSFILDIEKASKIGLFTQHTAEEFNMKVLKIDSQDNVKEIPFKTERNWVAEHEHDDEVGSIAIERFGDVDPEKLNTWMGRLLSEKGVDIFRTKGFISYSGNPRRIVFQGVHMLFTAQPDKEWGNEPRRNQLVFIGRNLNEKEMQEGFDKCLI

SEQ ID NO: 52288 - protein, 350 aa, Nicotiana tabacum
MDPKFSGKPIPIPFLAGRTDLDQMPDTPTRIARHRRAQSETFFRFPDFDDDILLDDVVADFNLDISAPSLSPSADTHMQPANSADSSSTGGPGLMSGPGANNNPRPLNHFRSLSVDADFFDGLEFGATTPGAAAEEEKKVFGSSSVSGSGTRHRHSNSMDGSFSTASFEAECSSSVKKAMAPDRLAELALIDPKRAKRILANRQSAARSKERKIRYTSELERKVQTLQTEATTLSAQITVLQRDNSGLTNENKELKLRLQALEQGAHLRDALNEALREELQRLKIAAGQILGANGNRGPRPHFPPQPQSFVQCGSHHAQQQQQHMPHSTTSTQNIGGQTQPSFMNFNNRG

SEQ ID NO: 52289 - protein, 162 aa, Bordetella pertussis Tohama I
MEAIKDFFGSLLLTELFKGLRLTGKYFFKRKVTLRYPMEKTPTSARFRGLHALRRYPNGEERCIACKLCEAVCPALAITIESEQRDDGTRRTTRYDIDLTKCIFCGFCEESCPVDSIVETHIHEYHGEKRGDLYFTKDMLLAVGDRYEAEIARRRAEDAPYR

SEQ ID NO: 52290 - protein, 426 aa, Ashbya gossypii ATCC 10895
MQAISGQLTEFADNEQFYMRQQVQQTHPGQQQPGGLPQMFSPQVNHARLLGQQQQLMHGMEGGQDLQATYLLKQKMEAVNAVFGHQQQGLQPQQAQQQLLASGVLNAPPGVSLVHQGVGGMAPPPGALPPQLPLATGVHGSGLGLAPVPLIHHPNHLLVREVWANNLTAEFASIRRLVDQYNVIALTTEFVGTIVRPIGNFRSKNDYHYQTMRTNIDLLNPVQIGLSLSDAQGNKPDNVPSTWQFNFLFDMSKEMVSPESLDLLKKSGVAFDKHQSIGVNAYDFAQLLVDSGLLLTDEVTWVSFHAAYDFGFLVNILTDASMPNNKEDYEFWVQKFLPSFYDLNVLSKAVHDLKGQRSIPQPQHSLESLADELGIPRFPLFNTTGGQSLLALLAFVRLAKFPVFKLSNGSLDFAQFKNSIYGINKE

SEQ ID NO: 52291 - protein, 249 aa, Arabidopsis thaliana
MATRRRTLLKVIVLGDSGYGRFRSLTSFNLYAFCSILILISDFRFSISRVGKTSLMNQYPFQLNNSFDLGYVHKKFSMQYKATIGADFVTKELQIGEKLVTLQIWDTAGQERFQSLGAAFYRGADCCALVYDVNVLRSFDNLETWHEEFLKQASPSDPKTFPFIVLGNKIDVDGGSSRVVSDKKAADWCASNGNIPYFETSAKDDFNVDEAFLTIAKTALANEHEQDIYFQGIPDAVTENEPKGGGCAC

SEQ ID NO: 52292 - protein, 457 aa, Saccharomyces cerevisiae
MREIIHISTGQCGNQIGAAFWETICGEHGLDFNGTYHGHDDIQKERLNVYFNEASSGKWVPRSINVDLEPGTIDAVRNSAIGNLFRPDNYIFGQSSAGNVWAKGHYTEGAELVDSVMDVIRREAEGCDSLQGFQITHSLGGGTGSGMGTLLISKIREEFPDRMMATFSVLPSPKTSDTVVEPYNATLSVHQLVEHSDETFCIDNEALYDICQRTLKLNQPSYGDLNNLVSSVMSGVTTSLRYPGQLNSDLRKLAVNLVPFPRLHFFMVGYAPLTAIGSQSFRSLTVPELTQQMFDAKNMMAAADPRNGRYLTVAAFFRGKVSVKEVEDEMHKVQSKNSDYFVEWIPNNVQTAVCSVAPQGLDMAATFIANSTSIQELFKRVGDQFSAMFKRKAFLHWYTSEGMDELEFSEAESNMNDLVSEYQQYQEATVEDDEEVDENGDFGAPQNQDEPITENFE

SEQ ID NO: 52293 - protein, 195 aa, Rhodospirillum rubrum
MEQASKGSGGGDWLIRGVFSLGLALASFGGPASAQAAGAHDYSFPAIDGGTLPLAAWAGHPVLVVNTASECGFTAQYEGLEALWKAYRAKGLIVLGVPSNDFGGQEPGSAAEIKDFCESTFAVDFPLTDKTAVSGARAHPFYAWAKASRPDLSAPRWNFHKYLIAPDGSLAASFSALTDPKDRDLTDAIDKLLEK

SEQ ID NO: 52294 - protein, 498 aa, Triticum aestivum
KKNILIEKLHIDISPSLAPWRLVPVSGIENICSSSIDNLGLESSKDEESSNALLSRAWSPGWRNAEKTLEDFVSHGLLDYSKDRMKVAGTTTSLLSPYLHYGEVSVRKIYQLVRVQQIKWENEGKSGAGESVNLFLLSIGLREYSRYLCFNFPFTHERSLLGNLKHYPWRADEDRFKSWRQGMTGYPLVDAGMRELWATGWTHNRIRVIVSSFAVKFLQIPWTWGMKYFWDVLLDADIESDILGWQYISGSLPDGHELGRLDNPEVQGQKYDPDGEYVRTWIPELARMPGEWIHHPWDAPSSILEVAGVELGFNYPMPIVELHTARECLDDAISTMWQLDTAEKLAELDGEVVEDNLSHIKSFDVPKVVLKELSPHCDREVPTDDGRNLELQPKELKGTNKQTICVDVIKASKMEDTGSIANSPISRKRSSSGSVFNVPSYSSSVEVHSQNQHPGGYLVGSSKYILQKAERNCVGKAEDDDSADSGTNTSRASKRPAA

SEQ ID NO: 52295 - protein, 472 aa, Thermotoga neapolitana
MYPIPSWVYDSVVYQIFPDRFFIGKGKTVEDKKDLYLKRGGTIEKWGVPPRKLPGAQHVKVFYGGDLWGIAEKIDYLEELGVNAVYLTPIFLSDTNHKYDTIDYFKIDPQFGGKRAFVHLLKVLHSRNIKLILDGVFNHVGSQHPWFKKARKKDPEYVNRFFLYRDRHRSWFDVGSLPELNVEVEEVREYILKVVQHYLEVGVDGWRLDCGHDLGPLVNLWINMKVKEFSSEKYLVSEIWTYPAGWEMVDGLMNYNFRSLVLSYVNGETDSIGTELERAYRETKNIFGCWNMLDSHDTPRLATTVPVKDLRKLAIVLQFTYPGVPLVYYGTEIGLTGGEDPECRATMEWNREKWDMELFEFYKKMIRFRRTDPGLRFGEFILLKEKPLAFMRKAPHPLQDTIVVVNPEEEKNVVLSLPDGKIMNATPLFDIFTGEKFHVDGGVVKVPVGRRSFRILKPIDLRVGRYRLYKRV

SEQ ID NO: 52296 - protein, 469 aa, Methanosarcina acetivorans C2A
MLKNVQKLGKFLIIICMIFIALSSPAFAATAEENAVAIEGVQTALTFVWLLLASGLVFFMHAGFSLVETGLTRSKNTANILMKNFMTIVLGILIYWAVGWGVMYGADAAGLIGTDQFFLSGADNALWNGWFFQMVFAATGATIVSGAMAERTNFKAYLIYCIMMVAVIYPVYGHWVWSGADLALLTGADSPIVQAIGVPSHDFAGSGVVHSIGGYSALAGVLLVGARIGKFKDGKAVPIPGHNLTIAFLGTLILALGWIGFNGGSTLDGNDPYMNLVVVNTFLAAAAGAVVTMLITWMKTGKPDPSLTANGLLGGLVAITAPCGSVNNWAAIIIGAIAGIIIYAGVMFNENTLKVDDPVGAIAVHGYCGSWGLISVGLFSIGIGNGILADAAYAAEVPGLFYGGGISLLLIQLISVLCSIVWAFGISFIIFKILDAVVGLRVSEEEEIMGLDICEHGIRAYPEYLMREE

SEQ ID NO: 52297 - protein, 186 aa, Zea mays
METGAVPMLLSQRQQGGARTAAAGLGARGRVFECKTCRRRFPTFQALGGHRASHRRPKPYPYPYGVGDPGLLRRTRLDEPRESAAGPRLHGCPICGLEFAVGQALGGHMRRHRRTSLAAESECELRSGDATSVEEANVGGAGCASGICLDLSLAPSGNCAKCRNDAVLGNTAHCERKSLILDCPPL

SEQ ID NO: 52298 - protein, 330 aa, Cryptococcus neoformans var. neoformans JEC21
MTANAKSIHNNADEKGYFNRQVSSFRDAIQPGGQFPPEKGRYHLYVALGCPWAHRSLIVRRLKGLEDFIDISIVHPHLHEGGWHFVTPEAAANPAPVSQHSDDSFPGATQDHLFGFSHLSKIYYKANPDYNARFTVPVVWDKIAGTIVNNESSEVIRFFNTGFNELLPEGKAKNLDLYPEELRGEIDELNEWVYHDINNGVYKSGFATTQEAYEKAVIPLGKALERINERLSDGREFLVGGRLTEADVRLYTTIVRYDPVYYSHFKCNTGLIRHDYPHINRWLKNLYWNYPAFKDTTNFDHIKDLYWYSQVNLNPTRIVPIGPKHNVEPL

SEQ ID NO: 52299 - protein, 449 aa, Streptococcus agalactiae 2603V/R
MSKQYDYIVIGGGSAGSGTANRAAMYGAKVLLIEGGQVGGTCVNLGCVPKKIMWYGAQVSETLHKYSSGYGFEVNNLNFDFTTLKANRDAYVQRSRQSYAANFERNGVEKIDGFARFIDNHTIEVNGQQYKAPHITIATGGHPLYPDIIGSELGETSDDFFGWETLPDSILIVGAGYIAAELAGVVNELGVETHLAFRKDHILRGFDDMVTSEVMAEMEKSGISLHANHVPKSLKRDEGGKLIFEAENGKTLVVDRVIWAIGRGPNVDMGLENTDIVLNDKGYIKADEFENTSVDGVYAIGDVNGKIALTPVAIAAGRRLSERLFNHKDNEKLDYHNVPSVIFTHPVIGTVGLSEAAAIEQFGEDNIKVYTSTFTSMYTAVTTNRQAVKMKLITLGKEEKVIGLHGVGYGIDEMIQGFSVAIKMGATKADFDDTVAIHPTGSEEFVTMR

SEQ ID NO: 52300 - protein, 763 aa, Cryptococcus neoformans var. neoformans JEC21
MVKSAVLGYPRIGVNRAMKKAIEAYWAGKISAEELQTTAKNVRKQRWESIKNAGVDTVPSGEFTLYDHLLDHSFNFGVIPERYVSQKLDPLDTYFAMGRGRQDRSKGIDVVACEMGKFFDSNYHIVKVDHSPETEFKLNNNQALSEYKEAKEHGITTRPVLFGPITYLSLVRKANSAPAEFQPLDLLDKLIPVYKELLSQLKEAGVEEVQLDEPILVMDKAESQAELFKKTYEALAPVAPKITITSAYGRVGKSIEFLKDLPVFALHLDLDREPKQLDEVVAAIKPTKLHLELGVVSGRNIWKNDLKASKALAEKAIAELGADRVSVSTSSSLLHTPISVKVENKLTAEQLSWLSFAEEKCEEVAALAQALNGTEGATFEQNTKDIAARREFERTSDSAVRDRVAAITEEQLKRKSPFPARREAQKKHLNLPKFPTTTIGSFPQTKEIRVARAKFSKGEITQEEYEKAMENEIKAVVDFQEKCGLDLLVHGEPERNDMVQYFGEQLNGFIFTQLGWVQSYGSRYVRPPIVVSDVSRPTPMTVKWSSYAQSLTEKPMKGMLTGPVTILNWSFPRADVSKEIQSKQLALALRDEVVDLAKAGIKAIQVDEPAIREGLPLRKADWDNYLTWAVDSFRLSTSGVEDDIQVHSHFCYSDFGDIFPSIQRLDADVISIEASKADLKLLDVFKSYGYSNEIGPGVYDIHSPRVPGEQEIKDRIAAMVKVLPADLMVVNPDCGLKTRGWKETEESLANLVAAAKWARETYA

SEQ ID NO: 52301 - protein, 350 aa, Cryptococcus neoformans var. neoformans JEC21
MSTDKKDITSWASKDGSFKRQVSSFRDFIEPGGKFAPEKGTCGWDKGRNSWVLMQPVAGRYHLYVSLACPWAHRTLIVRKLKGLEDFLDVSTVHPHMLEGGWHFVPKDKASAKPAPASAHDNDTFPNATSDPLFGFSHLRDLYFKAQPDYSARFTVPVVWDKKENTIVNNESSEIIRFFNTAFNGELPADKAKLDLYPEDLKKEIDELNEWVYNDINNGVYKSGFASTQEAYEAAVKSLAKALQKVEDRLSDGREFLMGDRLTEADVRLYTTIIRYDPVYYVHFKCNFGLIRHDYPNLHKWLQRLYWNHPAFKDTTDFDHIKEHYYYSHAQINPNRIVPFGPNVNIEPLK

SEQ ID NO: 52302 - protein, 152 aa, Capsicum ciliatum
YKDAWDTSVAVEVKVGDSVEVVRFFHCYKRGVDRVFVDHPMFLEKVWGKTGSKIYGPKAGQDYLDNELRFSLLCQAALEAPRVLNLNCSKYFSGSYGEDVLFIANDWHTAPIPCYLKSMYPSRGIYVHAKVAFCIHNIAYQGRFAFSDFSLL

SEQ ID NO: 52303 - protein, 490 aa, Burkholderia vietnamiensis G4
MPLTLSRTELVRTANLVDGSWRAALDGRCFDVTNPATLDTIAYAPDSGAADARAATDAAARALPAWRATPARERAAILRAWHAAIVAHTDDLAKLMSLEQGKPLAEARGEVAYGASYVLWFAEEATRTYGDLIPQQQRGKQLSAVKVPIGVVAAITPWNFPLAMIARKIAPALAAGCTVVAKPAEDTPLTALALGFLAMEAGVPPGVLNLIAASRERGIDAVADWLADARVRKITFTGSTAVGKLLARESAATLKKLSLELGGNAPFIVFDDAQLDAAVDGLMAAKFRNGGQTCVSPNRVYVQAGVYDAFAAKLAARVAALKVAPATDPAAQIGPMINARAVDKIARHVGDALERGARVLTGGRRLSQLGPNYYAPTVLADATADMQLSCEETFGPVAALFRFDTEEQAVDAANDTPFGLAAYFYTQDVRRIARVSARLETGIVGINEGALASEAAPFGGVKESGYGREGSKYGLDDYLSIKYLCQGGLD

SEQ ID NO: 52304 - protein, 384 aa, Escherichia coli K12 [sequence omitted]

SEQ ID NO: 52305 - protein, 243 aa, Prunus persica
MAYENKSMSLDSPQRKLGRGKIEIKRIENTTNRQVTFCKRRNGLLKKAYELSVLCDAEVALIVFSNRGRLYEYANNSVKETIERYKKACAESTNTGSVSEASTQYYQQEAAKLRAQTGNLQNSSRHMMGESLSSMNMKDLKNLESKLEKGINRIRSKKNELLFAEIEYMQKREIDLHNNNQLLRAKIAENERSQQNINVMAGGGSYEIMQSQPYDSRNYFQVNALQPNHQYNSRQDPMALQLV

SEQ ID NO: 52306 - protein, 155 aa, Capsicum cardenasii
YDQYKDAWDTSITIEVKVGDNIEVVRFFHCYKRGVDRIFVDHPMFLERVWGKTASKIYGPKAGQDYLDNELRFSLLCQVALEAPRVLNLNCSKSFSGPYGEDVLFIANDWHTALIPCYLKSMYQSRGIYMNAKVAFCIHNIAYQGRFSFSDFSLL

SEQ ID NO: 52307 - protein, 506 aa, Oryza sativa
MGKGTVVGTAVVVCAAAAAAVGVAVVVSRRRRSKREAEEERRRRAAAVIEEVEQRFSTPTALLRGIADAMVEEMERGLRADPHAPLKMLISYVDNLPTGDEHGLFYALDLGGTNFRVIRVQLGGREKRVVSQQYEEVAIPPHLMVGTSMELFDFIAAELESFVKTEGEDFHLPEGRQRELGFTFSFPVHQTSISSGTLIKWTKGFSINGTVGEDVVAELSRAMERQGLDMKVTALVNDTVGTLAGGRYVDNDVAAAVILGTGTNAAYVEHANAIPKWTGLLPRSGNMVINMEWGNFKSERLPRSDYDNALDFESLNPGEQIYEKMISGMYLGEIVRRILLKLAHDASLFGDVVPTKLEQRFILRTPDMSAMHHDTSHDLKHLGAKLKDILGVADTSLEARYITLHVCDLVAERGARLAAAGIYGILKKLGRDRVPSDGSQKQRTVIALDGGLYEHYKKFRTCLEATLADLLGEEAASSVVVKLANDGSGIGAALLAASHSQYASVE

SEQ ID NO: 52308 - protein, 255 aa, Prunus persica
MGRGSVQLKRIENKINRQVTFSKRRSGLLKKAQEISVLCDAEVALIVFSTKGKLFEYSTDSCMERILERYERYSYSEKQLLANDHESTGSWTLEHAKLKARVEVLQRNCSHFMGEDLQSLSLKELQNLEQQLDSALKHIRSRKNQVMYESISELQKKDKALQEQNNLLAKKVKEKEKALAPQAESWEQQVQNQGLDCSSTLLPEALQSLNFGSGSNYQGIRNDGSGGDHEDENETPTANRPNTLLPPWMLRHLNE

SEQ ID NO: 52309 - protein, 466 aa, Burkholderia vietnamiensis G4
MNQAALIEADRQHLIHPVVNYRAHEARGVTVLESADGVFLRDGDGHTLLDAFSGLWCVNVGYGRESIVKAAAEQMAKLPYATGYFHFGSQPAIELAERLAALAPPSLNRVYFTLGGSDAVDSAVRFITHYFNATGRPSKKQMIALERGYHGSSSIGAGLTALPAFHRHFDLPRADQHHIPSPYPYRHPLGDDPQALIAASVAALEAKVAALGADNVAAFFCEPIQGSGGVIVPPAGWLKAMRDACRRLGILFVADEVITGFGRTGPLFACETESVEPDLMTVAKGLTAGYAPMGAVLMSDEIYEGLAGSRTESAVVGHGHTYSAHPVSAAIGLEVLKLYHEGGLLANGRAQAPRFAAGLDALRAHPLVGDARSAGLLGALELVADKARKTRFDPALNVPDKIAAAAYANGVVFRAFGDGVLGFAPALSFTAGEFDLMFERVRKTLDDVLADPGVQRALDAAHAQPA

SEQ ID NO: 52310 - protein, 135 aa, Capsicum eximium
  misc_feature (134)..(134): Xaa can be any naturally occurring amino acid
  unsure (1)..(135): unsure at all Xaa locations
IKIEVKVGDHIEVVRFFHCYKRGVDRIFVDHPMFLERVWGKTASKIYGPKAGQDYLDNELRFSLLCQVALEAPRVLNLNCSKSFSGPYGEDVLFIANDWHTALIPCYLKSMYQSKGIYMNAKVAFRIHNIAYQXR

SEQ ID NO: 52311 - protein, 499 aa, Glycyrrhiza echinata
MDILSLLSYSVFYLALFFIFNIVIRARKFKNLPPGPPSLPIIGNLHHLKRPLHRTFKGLSEKYGHVISLWFGSRLVVVVSSASEFQQCFTKNDVVLANRPRFLSGKYIFYNYTTLGSTSYGEHWRNLRRITALDVLSNHRINSFSGIRRDETQRLITRLADDSSTNFAEIELSYRFYDMTFNNIMRMISGKRYYGEDCDMSDLQEASQFRDMVSELLQLSGANNKTDFMPLLRFLDFENLEKRLKDISGKTDAFLRGLIQEHRAKKERANTMIDHLLNLQDSQPEYYTDQIIKGLALAMLLAGTDSSAVTLEWSMSNLLNHPEVLKKVKDELDTHVGQDRLVDESDLPKLSYLKNVINETLRLYTPAPLLLPHSTSDECNIGGYKVPQDTIVLINAWAIHRDPELWTEATTFKPERFEKKGELEKLIAFGMGRRACPGEGLAIRAISMTLALLIQCFDWKLTNGDKIDMAERDGFTLTKLVPLKAMCKSRPVINKVFKQ

SEQ ID NO: 52312 - protein, 138 aa, Capsicum tovarii
VKVGDNIEVVRFFHCYKRGVDRIFVDHPMFLERVWGKTASKIYGPKAGQDYLDNELRFSLFCQAALEAPRVLNLNCSKSFSGPYGEDVLFIANDWHTALIPCYLKSIYQSKGIYMNAKVAFCIHNISYQGRFSFSDFS

SEQ ID NO: 52313 - protein, 442 aa, Pseudomonas putida KT2440
MRTLDVHPIIDNARFTPFHWMVMAWCGLLLIFDGYDLFIYGVVLPVIMKEWGLTPLQAGALGSYALFGMMFGALAFGSLADRIGRKKGIAICFALFSGATILNGFASNPSEFGIYRFIAGLGCGGLMPNAVALMNEYAPKRLRSTLVAIMFSGYSLGGMLSAGVGIFMLPRFGWESMFFAAAVPLLLLPVILYYLPESIGFLVRQGRIEEARTLLKRLDPDCDVQADDVLQAADRKGSGASVLELFRNGLAIRTLALWVAFFCCLLMVYALSSWLPKLMANAGYSLGSSLSFLLALNFGGMAGAILGGWLGDRYNLVKVKVAFFIAAALSISLLGVNSPMPVLYLLIFIAGATTIGTQILLYAGAAQMYGLSVRSTGLGWASGIGRNGAIVGPLLGGALMGINLPLQLNFIAFAIPGAIAALAMAVHLASGRRHAQTLAAQA

SEQ ID NO: 52314 - protein, 267 aa, Glycine max
GGKVESDMEFDEQEEHEEEEMVMPEPAAVSAPPSYDSLGNSGAMSKLGGGEGRKTALGAAAAAVRYRECQKNHAVSFGGHAVDGCCEFMAAGEDGTLEAVICAACNCHRNFHRKEIDGEITSFHYRAQPPPPPMHHHHQFSPYYHHRVPQHPAAAGYLHHHLTPPMSQHRPLALPAAASGGGLSREEEDMSNPSSSGGGGGGSKKRFRTKFTQEQKDKMLAFAEQLGWRIQKHDESAVEQFCAETNVKRNVLKVWMHNNKSTLGKKP

SEQ ID NO: 52315 - protein, 336 aa, Oryza sativa
MSSESEAAPGTGKLVCVTGASGYIASWLVRLLLARGYTVRATIRDTSDPKKTLHLRALDGANERLHLFEANLLEEGSFDAAVNGCDCVFHTASPFYHNVKDPKAELLDPAVKGTLNVLGSCKKASIRRVIVTSSMAAVAYNGKPRTPDVVVDETWFSVPEICEKHQQWYVLSKTLAEEAAWKFSKDNGFEIVTVNPAMVIGPLLQPSLNTSAEAILKLINGSSSTYPNFSFGWINVKDVALAHILAYEVPSANGRYCMVERVAHYSELVQIIREMYPNIPLPDKCADDKPSVPIYQVSKEKIKSLGLELTPLHTSIKETIESLKEKGFVTFDSSNL

SEQ ID NO: 52316 - protein, 450 aa, Gloeobacter violaceus PCC 7421
MEKADVIVIGSGQGGVPLAVDQARSGRRVVLFERGALGGSCINYGCTPSKALLAAAHAAGRARLAAPLGIHAEVTVDFARVMERVRGIRASFRQGIEQRLADAGVQIVHAEASFAGSSTVVGGGVEVQAPLVVINTGTGPTIPELPGLAGLPLLTNLNIFDLETLPRCTLILGGGYIGLELGQGLARLGSEVHIVHNHERLLNHEEPEVGEVLAEALRRDGIHLHLQSEVSQAVYQDGICALTLEDGQILRGEAALLAAAGRTPNTAALGAPAAGIALDKQGYVAIDEHFRTTAAGVYAIGDVARQPAFTHVSWEDYRRLQAILGGEERTRSDRVLGYAVYTEPQVGRVGLTLDQALAKGHRARSVTLPMAHIARAIEWGHDLGFYRLVVDEDTDKILGATLVGYEAAEIVHVLLAHMQADSTWKVLEQSVHIHPTYCEALPSLARLLKQ

SEQ ID NO: 52317 - protein, 551 aa, Saccharomyces cerevisiae
MPDLSNAIVAQDEMGRPFIIVKDQGNKKRQHGLEAKKSHILAARSVASIIKTSLGPRGLDKILISPDGEITITNDGATILSQMELDNEIAKLLVQLSKSQDDEIGDGTTGVVVLASALLDQALELIQKGIHPIKIANGFDEAAKLAISKLEETCDDISASNDELFRDFLLRAAKTSLGSKIVSKDHDRFAEMAVEAVINVMDKDRKDVDFDLIKMQGRVGGSISDSKLINGVILDKDFSHPQMPKCVLPKEGSDGVKLAILTCPFEPPKPKTKHKLDISSVEEYQKLQTYEQDKFKEMIDDVKKAGADVVICQWGFDDEANHLLLQNDLPAVRWVGGQELEHIAISTNGRIVPRFQDLSKDKLGTCSRIYEQEFGTTKDRMLIIEQSKETKTVTCFVRGSNKMIVDEAERALHDSLCVVRNLVKDSRVVYGGGAAEVTMSLAVSEEADKQRGIDQYAFRGFAQALDTIPMTLAENSGLDPIGTLSTLKSKQLKEKISNIGVDCLGYGSNDMKELFVVDPFIGKKQQILLATQLCRMILKIDNVIISGKDEY

SEQ ID NO: 52318 - protein, 228 aa, Capsicum chinense
MATAEMEKTTTFDEAEKVKLNANEADDEVEEGEIVEETDDTTSYLSKEIATKHPLEHSWTFWFDNPVAKSRQAAWGSSLRNVYTFSTVEDFWGAYNNIHHPSKLVVGADLHCFKHKIEPKWEDPVCANGGTWKMSFSKGKSDTSWLYTLLAMIGHQFDHEDEICGAVVSVRGKGEKISLWTKNAANETAQVSIGKQWKQFLDYSDSVGFIFHDDAKRLDRNAKNRYTV

SEQ ID NO: 52319 - protein, 423 aa, Ashbya gossypii ATCC 10895
MLSNKEIRIVSLLVLDTVFFLLEIIIGYTVHSLALIADSFHMLNDIVSLIVALWAVNVAKTRNPDARYTYGWKRAEILGALINAVFLIALCVSILIEAIQRFFEPQEVKNPQLILYVGTAGLLSNILGLFLFHEHGHSHSHGTTGEDMEAHSSSHSHSHHIGSHLHEDEPEAIQEFLPAAVVERYMSSSDENTPLVKDHDHKHSAHGADHRSLNMHGVFLHVLGDALGNVGVMLTAIFIWKTDYSWRYYSDPFVSLVITCIIFSSALPLSRKASRILLQATPSSISADEIKGKILAIPVAISVHDFHIWNLTETFSIASIHVQVDCGQDSYIGTAKVIRSIFHRYGIHSATVQPEFIGSRDVSDDSYRRFSRIAGGGLGSSTSVNEESDSTKDQVPHAYGATNSQTGCLVDDAANCNSDNCLP

SEQ ID NO: 52320 - protein, 528 aa, Neurospora crassa
MLSQRLIGRAAVRSAFKPSGLPVVVSPRLRRTYATESGLFANIKSWFSSKDSGRLTVDVPVEEKDLVIIGGGVAGYVAAIKAGQEGLKVACIEKRGTLGGTCLNVGCIPSKSLLNNSHLYHQILHDSKHRGIEVGDVKLNLAQLMKAKEQSVSGLTKGVEFLLKKNGVEYIKGAGAFADEHTINVKLNDGGETSVKGKNILIATGSEVTPFPGLEIDEKRVISSTGAIALEKVPEKMLVIGGGIIGLEMASVWSRLGAQVTVIEFLDQIGGPGMDLEVAKSIQKILKKQGINFKTGTKVVSGDKTGETVKLEVDSAKGGKPETLEGDVVLVAIGRRPYTEGLGLENIGLEKDERGRVIIDSEYRTKIPHIRCVGDVTFGPMLAHKAEEEAVAVVEYIKKGYGHVNYGCIPSVMYTFPEVAWVGQSEQELKKAGVPYRVGTFPFSANSRAKTNLDTEGMVKMIADPETDRILGVHIIGPNAGEMIAEGTLALEYGASSEDIARTCHAHPTLAEAFKEAAMATHSKAIHF

SEQ ID NO: 52321 - protein, 228 aa, Capsicum annuum
MATAEMEKTTTFDEAEKVKLNANEADDEVEEGEIVEETDDTTSYLSKEIAAKHPLEHSWTFWFDNTVAKSRQAAWGSSLRNVYTFSTVEDFWGAYNNIHHPSKLVVRADLHCFKHKIEPKWEDPVCANGGTWKMSFSKGKSDTSWLYTLLAMIGHQFDHEDEICGAVVSVRGKGEKISLWTKNAANETAQVSIGKQWKQFLDYSDSVGFIFHDDAKRLDRNAKNRYTV

SEQ ID NO: 52322 - protein, 412 aa, Oryza sativa
  misc_feature (13)..(13): Xaa can be any naturally occurring amino acid
  misc_feature (71)..(71): Xaa can be any naturally occurring amino acid
  unsure (1)..(412): unsure at all Xaa locations
TRPPMSMSWWWAXAIGAARKGRDVRRACEQQPPFRSVALVVGSTGIVGTSLVDILPLPDTPGGPWKVYALXGRPPPPWSPPPPAAVTHLCVDLADAAAVAEALAPLTDITHVFYVALAAPHLAEARSREANAGMLRNVLAAVVPTCPALAHVALQTGSKHYIGPPESIGKLPVETPFSEDMPRHDYPNFYYDQEDVLFDAVTSSSSSSSSRRAAAVTWSVHRPSLIFGFSPRSAMNVVCSLCVYAAICRKERRELRWPGSLGAWEGFSNASDADLVAEQQIWAAVADAAAKNEAFNCSNGDIYKWKQLWPVLAGKFGVEWAGYEGEERRVGLTAAMAGKEAVWAEIVAEEKLVATELGEVANWWFVDALFMDKWEFVDTMNKSKEHGFLGFRNTLRSFEAWIDKMKLYRIVP

SEQ ID NO: 52323 - protein, 383 aa, Carboxydothermus hydrogenoformans Z-2901
MSGKAYLIYSDDYLSYRLAEDHPLNPQRYALAVELMKIAEVLKEEEIIPPRSATLKELYLVHDPAYVEAVMNLSKNPENVNGSRFGLGSEDNPVFSGMHEAAALVAGGSALGAELIYEGEADHVFNIAGGLHHALRDAASGFCIYNDLAVAIAKFREKGLKVAYVDLDAHHGDGVQWLFYSDPGVLTISIHETGRYLFPGTGSITELGEGAAYGTKINIPLEPYTEDDSWLWALEEIVPELIRKFKPDILVTQHGCDSHRFDPLTHLANTTLAFQESAKLLHELAHEVCGGRWLAGGGGGYDYWRVVPRAWTIVWAEMTERSLPYDVPATFWRKYESKAGVFLPRTFLDEGSSGIPLGRRREITSKNQRTVERLKNALTLFWS

SEQ ID NO: 52324 - protein, 228 aa, Capsicum annuum
MATAEMEKTTTFDEAEKVKLNANEADDEVEEGEIVEETDDTTSYLSKEIATKHPLEHSWTFWFDNPEAKSKQAAWGSSRRNVYTFSTVEDFWGAYNNIHHPSKLVVGADLHCFKHKIEPKWEDPVCANGGTWKMSFSKGKSDTSWLYTLLAMIGHQFDHEDEICGAVVSVRGKGEKISLWTKNAANETAQVSIGKQWKQFLDYSDSVGFIFHDDAKRLDRNAKNRYTV

SEQ ID NO: 52325 - protein, 450 aa, Leuconostoc mesenteroides subsp. mesenteroides ATCC 8293
MVDKKKGQGLPNLPLSTIWMLSFGFLGVQMAFSLQSSQMGRIFQTLGADPTKLGFFFILPPLAGLFVQPLVGYFSDRTWTKRFGRRMPYLLVGALVSVIVMFLLPNSGSFGFSTTAGLWFGAITILFMDLSSNVAMQPFKMVVGDMVNEDQKSYAYSIQSFLSNTGSVLATIFPFLLTAIGVANTAPKGQVPASVIISFYVGALVLVVFSLIAVFNVKEYDDATYELYHGYALNTPNDGEGGFLTLLKRAPKTFWMVTLTQFFCWMAFQYLWTYGTGAVADNIFHATDPTTAGYQNGGNWFGIMSAVYAIAAVVWSLVLSKIPANKNKTGYALSLFLGAIGFTSVFFIHSQYLLIGSFILIGISWAGMMAYPFIMVTNALPGDHMGTYLGLFNGSICLPQIVASVASFALFPALGSHFPSMILVSGILMLIGAVSVGFINEIHSNPVDAQ

SEQ ID NO: 52326 - protein, 100 aa, Glycine max
HTAHVFKADIPGLKKEEVKVQIEDDKVLQISGERNVEKEDKNDTWHRVERSSGNFMRRFRLPENAKVEQVKASMENGVLTVTVPKEEVKKPDVKAIEISG

SEQ ID NO: 52327 - protein, 206 aa, ASPERGILLUS NIDULANS FGSC A4
MATNITHHAGITRNERNQLRKQKGLTIWLTGLSASGKSTIAVELEHQLLQRGLHAYRLDGDNVRFGLNKDLGFSDADRNENIRRIAEVAKLFADSSSIAITSFISPFRADRDTARKLHEVPTPNDSTGLPFVEVFVDVPIEVAEKRDPKGLYKKAREGIIKEFTGISSPYEAPENPEVHVKNVDLPIQEAVKQIIDYLDSKKLLDA

SEQ ID NO: 52328 - protein, 514 aa, Glycine max
MDLASVLLLLTSLCSSSALHELDSQEDALYALKVSLNVSANQLTNWNKNLVNPCTWSNVECDQNSNVVRISLEFMGFTGSLTPRIGSLKSLTILSLQGNNITGDIPKEFGNLTNLVRLDLESNKLTGEIPYSLGNLKRLQFLTLSQNNLYGTIPESLASLPSLINVMLDSNDLSGQIPEQLFSIPMYKYIATDNFSEKNILGQGGFGKVYKGILADGTKVAVKRLTDYESPAGDAAFQREVELISIAVHRNLLRLIGFCTTSTERLLVYPFMQNLSVAYRLRELKRGEPVLDWPTRKRVALGTARGLEYLHEQCNPRIIHRDVKAANILLDGDFEAVVGDFGLAKLVDIRHTNVTTQVRGTMGHIAPEYLSTGKSSERTDVFGYGIMLMELVTGQRAIDFSRLEEEDDVLLLDHREKRLETIVDCNLNKNYNIEDVEVIVQIALLCTQASPEDRPAMSEVVRMLEGEGLAERWEEWQHVEVNTRQDYERLQRRMNWGEDSVYNNQDAVELSGGR

SEQ ID NO: 52329 - protein, 429 aa, Staphylococcus epidermidis ATCC 12228
MKFTESERLQQLSNEYILGGVNSPSRSYKAVGGGAPVVMKEGHGAYLYDVDGNKYIDYLQAYGPIITGHAHPHITEAIQDQAAKGVLYGTPTELEINFSKKLREAVPSLEKIRFVNSGTEAVMTTIRVARAYTKRNKIIKFAGSYHGHSDLVLVAAGSGPSQLGSPDSAGVPQSVAQEVITVPFNDIESYREAIDYWKDDIAAVLVEPIVGNFGMVMPQPGFLEEVNKISHDNGTLVIYDEVITAFRFHYGAAQDLLGVKPDLTAFGKIVGGGLPIGGYGGRQDIMEHVAPLGPAYQAGTMAGNPLSMRAGIALLEVLEQEGVYDKLDQLGRRLEEGLQKLIDKHHITATINRIYGSLTLYFTNEKVTHYEQVENSDGDAFAQFFKLMLNQGINLAPSKFEAWFLTTEHTEEDIDRTLEAADYAFSKMK

SEQ ID NO: 52330 - protein, 58 aa, Cryptococcus neoformans var. neoformans B-3501A
MLTFPPNQPSQKTFIVKQKLAKKARQNRPLPQWFRLKTDNKIQYNAKRRHWRRTKLNL

SEQ ID NO: 52331 - protein, 203 aa, Nicotiana tabacum
HEETWGELPLKVDDSEDMVIYTLLKDALNVGWSPFNFTAGEVKSELMEEEIVVSPADTTAAPAAELPRGRHYRGVRRRPWGEFAAEIRDPAKNGARVWHRTYETDEEAAIAYDKAAYRMRGSKAHLNFPHRIGLNEPEPVRVTAKRRASPEPASSSENSSAKRRRKAVAAEKSGAVEVESKSNVLQVGCQVELLTRGHQLLVS

SEQ ID NO: 52332 - protein, 578 aa, Staphylococcus epidermidis ATCC 12228
MIKRYLKFVKPYRYRIIATIIVGIIKFGIPMLIPLLIKYAIDGVINNHSLTNQEKFSHLGVAIGIALFIFLIVRPPIEFIRQYLAQWTSNKILYDIRKQLYNHLQALSARFYANNQVGQVISRVINDVEQTKDFILTGLMNIWLDCITIIIALSIMFFLDVKLTFAAIFIFPFYILTVYFFFGRLRKLTRVRSQALAEVQGFLHERVQGMSVIKSFAIEDNEAKNFDNHNKNFLQRAFQHTRWNAYSFAAINTVTDLGPIIVIGVGSYLAITGSITVGTLAAFVGYLEQLFGPLRRLVSSFTTLTQSFASMDRVFQLIDEDYDIKNGIGAQPIKISKGQIDLKHVSFKYNENEKEVLHDINLTINKGETVAFVGMSGGGKSTLINLIPRFYDVTQGEILIDYHNVKDFLTGSLRNQIGLVQQDNILFSDTVKENILLGRPDATDDEVVEAAKMANAHDFISNLPNGYDTEVGERGVKLSGGQKQRLSIARIFLNNPPVLILDEATSALDLESEAIIQEALDVLSKDRTTLIVAHRLSTITHADRIVVMENGRIVETGTHQQLINKRGAYEHLYSIQNL

SEQ ID NO: 52333 - protein, 665 aa, Cryptococcus neoformans var. neoformans B-3501A
MIDNEDPSRDVAGAGELGQDWRPIGHTPNQLVLYHPASHALRVRIQPPSPPRSAFPSDIVRANDALRRRSPDSATRSLCLLCRQPVPRNGLGEVAAISGMESYFQTLEHVHSESESFSQGVGIDDLLDAPQPRTSNEENSSAAGYYARFFKEVRKLGMGAEGSVYLAVHHIEGDTLGTYAVKKIAVGESKEYLHKILREVKLLEVLRHTNIIPYYHAWIDTTRFSDLAPPVLALHVLMMYASGGNLDSLLLSRSHSTGFAAGLSADDIADAEPIDQLPKEERIKAFKRRRQSAKTEWANNQRPFTGGRRASRAENRGVLLLSFEEIAQLFGDIIDGLAFLHSNSILHLDLKCSNVLLHWEEGKLVLSGLNVFFSQTKGDVVRLWHFRRDAQRTERKDRSYGYHGVRHAPETLVQDAKGRFRPSDSHADMWSLGMILYKMMFLKLPYEECDSYDVLRAQILSYMGFLPDGSLLQNLQRRHIPKRFAFLLKELLDIHPEKRPSAEKTRSVLADIKHHSNQNEDYSSAIVGQTLASLENLSYPSSRSICRRDSVVVNDVHLDADATTPNNGLLPFFPLPKNNLLPSLTDVPERAMTCLAGPAVRLALLFGKLVSIQPSISGVRLPPVVAVILILLALTDLAHQGSFLWSLTCLIAHCAAVLNFSSHEI

SEQ ID NO: 52334 - protein, 841 aa, Crocosphaera watsonii WH 8501
MRAVLMAGGSGTRLRPLTCDLPKPMVPILNRPIAEHIINLLRRNNITEIIATLYYLPDVMRDYFQDGREFGVEITYAVEDEQPLGTAGCVKNVEDLLQNTFLVISGDSITDFDLQAAIAFHRQKKSKATLVLTRVPNPMEFGVVITDQEQKISRFLEKPSSSEIFSDTVNTGTYILEPEVLEYLPLKQESDFSKDLFPLLLAKGEPMYGYIAEGYWCDVGHLDAYREAQYDALEKKVKLYFAYTEESPGIWLGQNTYIDPTARIEPPALIGDNCRIGSGVVIEQGCVIGDNVTIGAVSDLKRPIIWNGVTIGDESYLAACVIARGTRLDRRAQVLEGAIIGPLSIVGEEAQISSNVRVWPSKRIESGAILNINLIWGSTANRNLFGQRGVTGLANIDITPEFAVKLGAAYGSTLKAGSQVVVSRDQRGFSRMISRSLISGLMSVGIDIQNLEATAIPISRTMTPKLGVSGGVHLRAHPDRMDHILIEFFDDEGINISKSQEKKIEGAYFKEDLRRVGIADIGIMAYPAQIIETYRQTFETQLDLDSISNSEPKIVIDYAYGVSGAILPQLLTKFGCDAIVLNASLRQTSVPTEERESLLHQLGQVVEAVKANLGAQVSANGEQFILVDESGLPIRGEWLTALMVNTIFTAYPRSIVVVPVEASSAVEQIARRHDGRVIRTKSNPTALMEAAQANSNVSLGGSGDTGFIFPQLHPGFDAMFSLAKLLEMLATQGRSLVQIQAELPRICHKSYVLRCPWKIKGALMRYLVEIHHHEQLELIDGVKIINPQNDNWVLILPDAGDAFVHIVANSDDREWVDVTLREYRHKVQKFIEHEQDNLNSM

SEQ ID NO: 52335 - protein, 333 aa, Cryptococcus neoformans var. neoformans JEC21
MAPASHFTLNNGKKIPSIGLGTWQSEPGQVAKAVESALKSGYRHIDCAWAYGNEKEVGEGLKASGVPREEIHITSKLFELHHHPEHVELACKDTLKNLGVEYLDLYLLHWNINFQVDAPKGTVPTFDHAVKADNGKIKLDVALADNVMPTWREMEKLVEKGLVKSIGISNFNIHRTEKLLKEAKIKPVADQVELSIQCPQHELVAYLKSKDILPQGYSPLGGTGKSNLRENDVVQKIADKYKVQTANILLSWLVMRGINPVPKSVTPERIANNLKLVDLSQEDFKELEKLAESHPPKRVCDQSEDFEPKYDIFQENDPEFSDKAQFAKLGLKL

SEQ ID NO: 52336 - protein, 586 aa, Ustilago maydis 521
MEADEQLFPIAILIDELKSDDVTLRLNAIHRISTIALALGPERARDELIPFLQDSLDDEDEVLLALAQELGSGFVEYLGGPPYAHLLLGPLENLAAVEESVVREKAAESIVKIAEVLSEAQIEEHYIPLLKRLSGGDWFTSRTSSTSLFSAVYPKAKPTTQEELRKMFTALCNDDTPMVRRAAARDLGPFAKNLSKELVVSDIIPLYRKLSSDDQDSVRLLTVQDLIAIAESLNHDESKNYLLPSIRSAVQDKSWRVRYMVADHFVKLASAVGEDVVRDELVMAFVHLLKDNEAEVRTAGAGQIPGFAKLVDQDIILARLMPCVRDLAGDNSQHVRAALGMQISGMAPLLGKEATIEHLLPLFLQLLKDEFPDVRLNIISKLEQVNEVIGIDLLSQSLLPAIVELAEDKQWRVRQAIIEYIPLLANQLGVQFFDEQLSNLCMSWLGDTVFSIREAATVNLKKLTDVFGVAWARQTIIPKVLQMGTHPNYLYRMTTIFAITTMAPSLDTPAITGDVLETVLPMVSDPIPNIRFNVAKAFEVLSSVLVKTPEGNEVIKSKISPALEKLKEDSDADVRFFAQKALDAES

SEQ ID NO: 52337 - protein, 482 aa, Cryptococcus neoformans var. neoformans JEC21
MPEQPDYGTTSPPRPSSSASMSQHPLHDPKNGHASVVSSVSNLSNTILGAGALAFPSAFAAMGLLPGILSCAFSGVTAIFGLYLLSRCATIVGTRPGDEGKKASFNEIAKLTFGKGWATKAFDLAIAIKCFGVSISYLIICKTLLPQVCYTIAKLVKQPLPDDSILLASHFWLIVWMAIITPLSFMRTLDSLRFTSQIALLTVVYLVLVVVGWYTLKGPSPERGQVVLFRFGKSTLSSFPVQVFAYTCSQNLFPIFNELKDRTQKKMNTVIGSSIGTAIGVYQVIGIVGYLTFGDRVSSNVIAMYPATTMLVAIGRLGIVLLVGLSYPLQLLPCRASLYHLTHSLFHHHDVSGAPTNGRSIQDDSDTDMEDEEIGPLVPKAHEDHAHHKHDMPQLQFLVLTLGILISGFLIAYNVHELDIVLSFVGSTGSTIISFILPGFFYFRLFRDEPGTMKWWALALGIYGLGVMGFCLTFNIIKLVQH

SEQ ID NO: 52338 - protein, 128 aa, Pseudomonas aeruginosa UCBPP-PA14
MAYSEKVIDHYENPRNVGKLDAADPNVGTGMVGAPACGDVMRLQIKVNEQGVIEDAKFKTYGCGSAIASSSLATEWMKGKTLDEAETIKNTTIAEELALPPVKIHCSVLAEDAIKAAVRDYKQKKGLL

SEQ ID NO: 52339 - protein, 967 aa, Glycine max
MANRNLEKMASIDAQLRQLAPAKVSEDDKLIEYDALLLDRFLDILQDLHGEDLKETVQEVYELSAEYEGKHDPKKLEELGNLITSLDAGDSILVAKSFSHMLNLANLAEEVQISRRRRNKLKKGDFADENNATTESDIEETLKKLVFGLKKSPQEVFDALKNQTVDLVLTAHPTQSIRRSLLQKHGRIRNCLSQLYAKDITPDDKQELDEALQREIQAAFRTDEIRRTPPTPQDEMRAGMSYFHETIWNGVPRFLRRVDTALNNIGIKERVPYNAPLIQFSSWMGGDRDGNPRVTPEVTRDVCLLARMMAANLYYSQIEDLMFELSMWRCNDELRVRAEELHRSSKKDEVAKHYIEFWKKVPPNEPYRVVLGEVRDRLYQTRERSRHLLSNGYSDIPEEATFTNVEEFLESLELCYRSLCACGDRAIADGSLLDFMRQVSTFGLSLVRLDIRQESDRHTDVLDAITKHLEIGSYQEWSEEKRQEWLLSELSGKRPLFGPDLPQTEEIRDVLDTFHVIAELPPDNFGAYIISMATAPSDVLAVELLQRECHIKHPLRVVPLFEKLADLEAAPAALARLFSIDWYRNRINGKQEVMIGYSDSGKDAGRFSAAWQLYKAQEELINVAKKFGIKLTMFHGRGGTVGRGGGPTHLAILSQPPDTIHGSLRVTVQGEVIEQSFGEQHLCFRTLQRFTAATLEHGMHPPISPKPEWRALMDQMAVIATEEYRSIVFKEPRFVEYFRLATPELEYGRMNIGSRPAKRKPSGGIETLRAIPWIFAWTQTRFHLPVWLGFGAAFKEVIEKNVNNLNMLQEMYNQWPFFRVTLDLVEMVFAKGDPKIAGLKDRLLVSKDLWRFGDQLRNKYEETKKLLLQVAGHKEILEGDPYLKQRLRLRHAPITTLNIVQAYTLKRIRDPNYNVKVRPRISKESAEASKSADELIKLNPTSEYAPGLEDTLILTMKGIAAGMQNTG

SEQ ID NO: 52340 - protein, 1084 aa, Pseudomonas aeruginosa
MKSASALEHDNKLLLKWTTLSQSLSIGLICVVVLTVLLFSICYWSLGRLFQEEEDKVSFHFTRMMDVIREHEVFLGRIARKSDKTTQKYDYDVVPLQRHLLAKENGLAVYEGREFSFAMPFLLATKHALSADSSGDPFSLGVLLANFYGSFWSVSAYPAPQLLIFDLSGSTRLAVPSIPSTAQRDRLSGSYPMIVERILARLRTRPVGEDAQRVHWIRADRYRDSALEMLGVARVDLPETLWWHDEPNHLIIAASLLDLRRINDFEQLVERPAFDSYSLVSPDGEVLLGAAPATGLRDGLNLTRQGVAVQLLSQPENGWLAVYRTDYGNFFRHSRWLVAGLLLTPALLLAGWLGMRWYTSSVVNPVHRAHRQLVESDTFSRTLIQTAPVALVVLTQDDQQLVTCNHLAAQWLGGPTEILGLTSNWKLFDARGQVPGDICIQVGGRYLQTAFAATRYAGTEAVLCVFNDITVHCEAETALSNAKRAADAASQAKTLFLARMSHEIRTPLYGVLGTLELLDLTTLNERQRAYLRTIQSSSATLMQLISDVLDVSKIEAGQMALTLAAFNPLDLVREVLGNFAASAMAKDLQFYACIDTEVPAQLIGDVTRIRQVLNNLVNNALKFTDIGRVVLRVKLLSRNDGRALLQWQVADTGIGIAHEQQERLFEAFYQVSGAHHAGGTGLGLSICWHLAEMMGGHLRMVSETGLGSSFSLVLELPEDEQSGLACRPGLLKSACVHVRSPVRELADSVGAWLKAWGCKVSSGEAAPSELETCVLLELLPMAAGPASSPWPGPRVRASMDAPCQPELREDGWRVGLHNLAGIGQALAQALGGDIPEQTPANACARSGRLDLEVLVAEDNPVNQALLREQLEELGCRVSLAGDGRQALQLFDSGRFDLLLSDVNMPNMTGYELTQALRERGETLPIIGVTANALREEGERCRAVGMNSWLVKPITLHTLHELLSEFARAGVVLPAQARDLGPPAQLDDGLSPQVPERMRALFLETMGKDLEAARQAIRRNDPKGLQQDLHRMAGSLAVMRARTLVVMCQGAEEGLLESRLECSAVEIGEVLVHIEQALEFVRKTG

SEQ ID NO: 52341 - protein, 526 aa, Zea mays
MDLPPLSHQALFAAVRSADAAAVRALLADAEASGTSLAALAAAQTDAGETALYVAAEAGSEETVSLLLPLYDLEAATVRSRLDLDAFHVAAKQGHTGVVKEFLGRWPGLCSVCDSSNTSPLYSAAVKDHLDVVNAILDTDDSCIRIVRKNGKTSLHTAARIGYHRIVKALIERDPGIVPIKDRKGQTALHMAVKGKNTDVVEELLMADVSILNVRDKKGNTALHIATRKWRPQMVQLLLSYESLEINAINIQNETAMDLADKVPYGESKTEIIEWLTEAGAKNARNVGKIDEASELRRTVSDIKHNVQAQLSENAKTNKRVTGIRKELQKLHREAIQNTINSVTMVATLIASIAFVAIFNLPGQYFQDVNSGGDIGEAQIAKLTGFRVFCLLNATALFISLAVVVVQITLVAWETGAQKQVIKIVNKLMWTACLSTGAAFISLAYVVVGPQHAWMAFTVSAIGGPIMIGTLLFLAYLLLRPRFKFGEDRQRRIKRASGSKSFSWSLHDGFSDLEAFSDHEKKIYAL

SEQ ID NO: 52342 - protein, 65 aa, Glycine max
NNIGIKERVPYNAPLIQFSSWMGGDRDGNPRVTPEVTRDVCLLARMMAANLYYSQIEDLMFELSM

SEQ ID NO: 52343 - protein, 228 aa, Arabidopsis thaliana
ASTLRFGSGLMRTSQRISAAGTSAAALRGLRCYSSKNQTLKERFAEQLPEKIEQIKKLRKEHGSKVVGEVTLDQVYGGARGIKSLVWEGSVLDAEEGIRFRGKTIPECQKLLPKAPGGNEPLPEGLFWLLLTGEIPTEQQVRDLSADWAARSDIPKFVEELIDRCPNDLHPMAQLTIAVNALEHESAFAKAYAKGMSKAEYWKHTYEDAMDVIAKLPTIAARIYQNVF

SEQ ID NO: 52344 - protein, 335 aa, Schizosaccharomyces pombe
MAIPKVGINGFGRIGRIVLRNAILTGKIQVVAVNDPFIDLDYMAYMFKYDSTHGRFEGSVETKGGKLVIDGHSIDVHNERDPANIKWSASGAEYVIESTGVFTTKETASAHLKGGAKRVIISAPSKDAPMFVVGVNLEKFNPSEKVISNASCTTNCLAPLAKVINDTFGIEEGLMTTVHATTATQKTVDGPSKKDWRGGRGASANIIPSSTGAAKAVGKVIPALNGKLTGMAFRVPTPDVSVVDLTVKLAKPTNYEDIKAAIKAASEGPMKGVLGYTEDSVVSTDFCGDNHSSIFDASAGIQLSPQFVKLVSWYDNEWGYSHRVVDLVAYTASKD

SEQ ID NO: 52345 - protein, 492 aa, Raphanus sativus
MDPYKYRPASSYNSPFFTTNSGAPVWNNNSSMTVGPRGPILLEDYHLVEKLANFDRERIPERVVHARGASAKGFFEVTHDISNLTCADFLRAPGVQTPVIVRFSTVIHERGSPETLRDPRGFAVKFYTREGNFDLVGNNFPVFFIRDGMKFPDMVHALKPNPKSHIQENWRVLDFFSHHPESLNMFTFLFDDIGIPQDYRHMEGSGVNTYMLINKSGKAHYVKFHWKPTCGVKSLLEEDAIRVGGTNHSHATQDLYDSIAAGNYPEWKLFVQIIDPADEDKFDFDPLDVTKTWPEDLLPLQPVGRMVLNKNIDNFFAENEQLAFCPAIIVPGIHYSDDKLLQTRVFSYADTQRHRLGPNYLQLPVNAPKCAHHNNHHEGFMNFMHRDEEVNYFPSRYDPVRHAEKYPTPPAVCSGKRERCIIEKENNFKEPGERYRSFTPERQERFIGRWIDALSDPRITHEIRSIWISYWSQADKSLGQKLASRLNVRPSI

SEQ ID NO: 52346 - protein, 470 aa, Bacillus anthracis str. A2012
MVVGDFPIELDTVVVGAGPGGYVAAIRAAQLGQKVAIIEKANLGGVCLNVGCIPSKALINAGHRYENAMHSDDMGITAENVKVDFTKVQEWKNGVVKKLTGGVEGLLKGNKVEIIRGEAYFVDANTLRVMTEEAAQTYTFKNAVLATGSTPIEIPGFKYSKRVINSTGALSLPEIPKKLVVIGGGYIGMELGTAYANFGTEVTVVEAGDEILAGFEKAMSSVVKRALQKKGNVNIHTKAMAKGVEETETGVKVSFEVKGEIQTVEADYVLVTVGRRPNTQEIGLEQVGVKMTDRGIIEIDEQCRTNVPNIYAIGDIVPGPPLAHKASYEGKVAVEAISGHASAIDYIGIPAVCFTDPELASVGYTKKQAEEAGMTVTVSKFPFAANGRALSLNSTDGFLQLVTRKEDGLLVGAQVAGAGASDIISEIGLAIEAGMTAEDIAQTIHAHPTLGEITMEAAEVALGMPIHIVK

SEQ ID NO: 52347 - protein, 339 aa, Streptomyces coelicolor A3(2)
MTFRMPPEWAPHERTWMAWPGPNATFTDAEELAGARAAWASVARAVRRFEPVTMVHGPGQAATARELLGPDVDLVERELDDAWMRDIGPTFVTDGRGGLAAVDWVFNGWGAQDWARWEHDAEIARHVADLAAAPVLSSPLVNEGGAIHVDGEGTVLLTDTVQLGSGRNPGWSREEVEAEIHAKLGTTTAIWLPHGLAGDYGRYGTQGHVDIVAAFARPGTVVVHSQRDPRHPDHERSQLYLEILRGRTDARGRRLEVVEVPAPTVLKDEEGEWADYSYINHYVCNGGVVLCAFGDPNDELAAGIFRRLFPERTVTLVDARTIFAGGGGIHCITQQQPRT

SEQ ID NO: 52348 - protein, 350 aa, Ralstonia eutropha JMP134
MFVRNTWYVAGWDNEVGASNLFSRTIIGIPVLMYRAEDGTLHALEDRCCHRGAPLSIGRREGDCVRCMYHGLKFDTSGRCIEAPAQQRIPPQARVRVLPVVERNRWIWIWMGDPEAADPALIPDTHWLADPAWRSLDGYIHYDVNYLLIADNLLDFSHLPFVHPTTLGGSEAYAAAQPKVERLDDGVRITRWTLNTEAPPFAKQVKNWPGKVDRWNIYNFTIPAILLMDSGMAPTGTGAPEGQRIDAAEFRGCQALTPETENSTHYFFAHPHNFAIDNPEVTRSIHQSVVTAFDEDRDIITAQQRSLALAPDFKMVPFSIDAALSQFRWVVERRVADEAAQAQQRQAKEA

SEQ ID NO: 52349 - protein, 228 aa, Capsicum annuum
MATAEMEKTTTFDEAEKVKLNANEADDEVEEGEIVEETDDTTSYLSKEIATKHPLEHSWTFWFDNPEAKSKQAAWGSSRRNVYTFSTVEDFWGAYNNIHHPSKLVVGANLHCFKHKIEPKWEDPVCANGGTWKMSFSKGKSDTSWLYTLLAMIGHQFDHEDEICGAVVSVRGKGEKISLWTKNAANETAQVSIGKQWKQFLDYSDSVGFIFHDDAKRLDRNAKNRYTV

SEQ ID NO: 52350 - protein, 148 aa, Capsicum frutescens
WDTSITIEVKVGDNIEVVRFFHCYKRGVDRIFVDHPMFLERVWGKTASKIYGPKAGQDYLDNELRFSLLCQAALEAPRVLNLNCSKSFSGPYGEDVLFIANDWHTALIPCYLKSMYQSKGIYMNAKVAFCIHNIAYQGRFSFSDFSLL

SEQ ID NO: 52351 - protein, 346 aa, Candida albicans
MTPNGSRRHSAYMGSPRSQHSSTMETGYNPYEAVQKKQELYQNNNGNSPTVIIEEDPYIPNYKELSLANKKTNYNMKIVVVGDGGCGKTCLLLAYTQNKFPSIYVPTVFENYVTAVQSPNGKTVELALWDTAGQEEYDRLRPLSYPDVDILLVCFAVDNEVSLENVKDMWFPEVNHYCPGIPIILVGTKSDLLSDMNHDASIRVAKEIGAIGLIFTSAKTMFNVRTVFNFALNHFQRNMELQEQYEKTLGSRKRISRVLGGSNGGSGNHSRHHSRNYSNVSNNRRGHLKNTSYDSTALLDQPLTEDTYVKNPYGNFGYKANVESPYNQDEFAFTRERKKKKKCVIL

SEQ ID NO: 52352 - protein, 480 aa, Kluyveromyces lactis NRRL Y-1140
MSGRVLDLFKPFEAYLPEVIAPERPVPYKQKLIWTGVSLLVFLVLGQIPLYGIVSSETSDPLYWLRAMLASNRGTLMELGVSPIITSSMIFQFLQGTQLLQVNMENKQDRELYQIAQKVFAILLTFGQAIVVVLTGNYGKPSDLGLAISLLLIFQLIFASFTVLLLDELLSKGYGLGSGISLFTATNIAEQITWKAFAPTTVNVGRGQEFEGAVIALFHLLAIRKDKKRALVEAFYRENLPNMFQVFSTIGVFLSVLYLQGFRYELPIKSTRTRGQYGSYPIKLFYTSNTPIMLQSALTSNIFLISQILYQRFSTNPLVKLLGVWGTRAGAPAGQQVALSGLSYYIQPPFSVTDALLDPIKTVVYVGFVLGACALFSKTWIEISGTSPRDVAKQFKDQGLTINGKRETNVYKELKKIIPTAAAFGGAVIGALSVGSDLLGTLGSGTSILMATTTIYGYYEVAAKEGGFTKNLVSGFSEMM

SEQ ID NO: 52353 - protein, 374 aa, Bacillus anthracis str. A2012
MNGMGTKTKKTLFNVDEQMKAIAAQFETLQILNEKGEVVNEAAMPELSDDQLKELMRRMVYTRVLDQRSISLNRQGRLGFYAPTAGQEASQLASHFALEAEDFILPGYRDVPQLVWHGLPLYQAFLFSRGHFMGNQMPENVNALAPQIIIGAQIIQTAGVALGMKLRGKKSVAITYTGDGGASQGDFYEGMNFAGAFKAPAIFVVQNNRYAISTPVEKQSAAKTVAQKAVAAGIYGIQVDGMDPLAVYAATAFARERAVNGEGPTLIETLTFRYGPHTMAGDDPTRYRTKDIENEWEQKDPIVRFRAFLENKGLWSQEVEEKVIEEAKEDIKQAIAKADQAPKQKVTDLMEIMYEKMPYNLAEQYEIYKEKESK

SEQ ID NO: 52354 - protein, 287 aa, Schizosaccharomyces pombe
MEKLLAFSTQLQAQGNSSNSPPDPKDLDPSVLDHIFGANPADEMRKAMDAIEDPSVPLDQKEIAFDNLEMLVEHIDNANNLVPLQLWPRLLKQLESPESTLRRLAAWTIATAVQNNPKSQQALIENDGLKILFGALKKEDSDETKNKVLYAITSELKLNEAGIALLDKIPNSWEMLIEILELKHSVMTKRVIFFFYALLIQEDKSKQIILQKAHEFQIPEKVYQFSLEHSVDEDCVTKSLHTLYLFQKNKVSVANTNELLKSLVQFKSEFPEIFTVDEWKAFHEALE

SEQ ID NO: 52355 - protein, 610 aa, Bordetella pertussis Tohama I
MARNKLDLRGSAFKAVLGFTFRHWARQPWRIGLIAMLALLSALADILTPLYVGRLIDAVAGGAPADTVARNAALGAFWLLIALGVGATLLRQAIFMNIIALTLKMMHDIVGLAFHQVQRLSSDWHANTFAGSTVRKITRGMWALDLLNDTLLIALLPSLAMLAGATALLGWHWPLMGLVVGLGSLLYVAVTMALSLDYVAPAARLGNAWDTRMGGALADAVSCNAVVKAFGAEWREEARLARVTDKWRHRTRRGWVRGTINGGVQGAMLVAMQAAILGVALLLWQRGQASVGDVTFAFTTFFMLQGYLRDVGMNIRNLQRSINDMEELVSLQRQPLDVEDLPGAGPIDIGAGEIRFENVTFRYGPHEQPLYRDFSVRIAPGERVGLVGHSGSGKTTFIKLIQRLYDVDGGRITIDGQDIAAVRQASLRSQIAIVQQDPVLFHRSLAENIAYGRPGATQAEIERAARLASAHDFIMALPKGYDTLVGERGVKLSGGERQRVAIARAFLADAPILILDEATSSLDSESEVLIQRAMERLMEGRTTLVVAHRLSTVRALDRLLVMDRGRVIEEGSHEALIRLHGGVYRRLFERQALELTRGLSQWELGGAAAS

SEQ ID NO: 52356 - protein, 152 aa, Triticum aestivum
MGALDHLSRLCNLTHTREAIRIKKRRPLTTVNIKVKMDCEGCERRVKSAVKSIRGVTAVVVNRKISKVTVTGYVEPRKVLARVKRTGKTTADMWPYVPYTVATYPYVGGSYDKKAPAGLVRNVPQAMADPAAPEVKYMNMFNDEDVTACTVM

SEQ ID NO: 52357 - protein, 163 aa, Alkalilimnicola ehrlichei MLHE-1
MTALRDYVKSFLLVELLQGLRLTGKHFLSRSVTLEYPEEKTPKSPRFRGMHALRRYPNGEERCIACKLCEAVCPALAITIEAGPREDDGTRRTTLYEIDMFKCIYCGFCEESCPVDSIVETREHEYHMEHREERVFDKARLLANGDKYEAQIAADRAADAPYR

SEQ ID NO: 52358 - protein, 358 aa, Rubrivivax gelatinosus
MLATPTIESPEEAARRAKESTLLSPRFYTTDYAAMNAIDVSSIRAEWDAMLAEYEGDNNHDHFQRTPEFPQEVAERFSQVSPELRQEFLDFLVSSVTSEFSGCVLYNEIQKNVENPDVKALMRYMARDESRHAGFINQALRDFGLGIDLGGLKRTKAYTYFKPKYIFYATYLSEKIGYARYITIYRQLERHPDKRFHPIFRWFERWCNDEFRHGESFALILRAHPHLITGPNLLWVRFFLLAVYATMYVRDHMRPLLHEAMGLESTDYDYRVFQITNEISKQVFPISLDIDHPAFRAGMERLVHVKTKVDAAKARGGLVGRLQQAAWAAAGAATFARMYLIPVRRHALPAQVRMAPAW

SEQ ID NO: 52359 - protein, 397 aa, Candida albicans
MFLKNIFIGLAIALLVDATPTTTKRSAGFVALDFSVVKTPKASPVTNGQEGKTSKRQAVPVTLHNEQVTYAADITVGSNNQKLNVIVDTGSSDLWVPDVNVDCQVTYSDQTADFCKQKGTYDPSGSSASQDLNTPFKIGYGDGSSSQGTLYKDTVGFGGVSIKNQVLADVDSTSIDQGILGVGYKTNEAGGSYDNVPVTLKKQGVIAKNAYSLILILQMLPRDKSFSVGLIMLNIVGSLIALPVTSDRELRISLGSVEVSGKTINTDNVDVLLDSGTTITYLQQDLADQIIKAFNGKLTQDSNGNSFYEVDCNLSGDVVFNFSKNAKISVPASEFAASLQGDDGQPYDKCQLLFDVNDANILGDNFLRSLILFMIWMIMKFLWLKSNILLFQYFSLT

SEQ ID NO: 52360 - protein, 566 aa, Acidianus ambivalens
MEKLSYDAIVIGGGLAGLMAAHEIAVSGYKVAVISKVFPTRSHSSSAEGGIAAYIEGNSDPNDNPDYMTYDTIKGGDFLVDPDAAELLSQKSGEIVRIMESWGTLFNRQPDGRVAVRYFGGQTYPRTRFVGDKLEMALLHTLFQRVSGLDIDFYNEWFALDLIRDDKRVVGVVAMEMKSMTPVFFKARAIVMATGGMGMLYAHSTNAYINTGDGYAMALRAGAALKDPEFVQFHPTALYPSDILISEAARGEGAILINNKGERFMARYAPRKLDLAPRDITSRAIITEIREGRGFPGGYVGLDLRHLGEDYIKERLALAYEAAKNFAGVDATQEPIPVRPAQHYYMGGIDVDITGQNPDLVGLFAAGEAACVSVHGANRLGSNSLLETLVFGRETGRAVAKFLSEHKEEDSNSLDKEAEKVVDDAYKFVKSESGVHFGEILNKLRNVMWEKVGIFRDEDGIKDALSQIIELRKMTSSMYVLDKSTTYNTEFFNALELRNMLDLAIVIARTALERKESRGAHYRTDYPERDDTNWLKHTIAYLKGETVEITYKPVRITRWKPEPRVY

SEQ ID NO: 52361 - protein, 410 aa, Pseudomonas putida KT2440
MNEYAPLRLHVPEPTGRPGCQTDFSYLRLNDAGQARKPAIDVDAADTADLSYSLVRVLDEQGDAQGPWAEDIDPQILRQGMRAMLKTRIFDSRMVVAQRQKKMSFYMQSLGEEAIGSGQALALNRTDMCFPTYRQQSILMARDVSLVEMICQLLSNERDPLKGRQLPIMYSVREAGFFTISGNLATQFVQAVGWAMASAIKGDTKIASAWIGDGATAESDFHTALTFAHVYRAPVILNVVNNQWAISTFQAIAGGESTTFAGRGVGCGIASLRVDGNDFVAVYAASRWAAERARRGLGPSLIEWVTYRAGPHSTSDDPSKYRPADDWSHFPLGDPIARLKQHLIKIGHWSEEEHQAVTAELEAAVIAAQKEAEQYGTLANGHIPSAASMFEDVYKEMPDHLRRQRQELGV

SEQ ID NO: 52362 - protein, 1081 aa, Gloeobacter violaceus PCC 7421
MHFEDALEVADAAVFYGRTDELATLERWLAREHCRLIAVVGIGGVGKTALSIRLARRVQPHFERVLWRSLRNAPPLSDLLAELIELIAGSPQTSLPVTVEGRTTQLLAQLRRCRCLLMLDNGESLLGGGERPGSYLQGYEGYGELFRRVGESVHRSCLLITSREKPDEVAVLEGEMLPVRSMRLGGLQQGEGERILEVWGLRGTDGQRRQLVERYRGNPLALKIMGATIQELFSGDIGAFVAQDAVVFDGLRSLLDQQFDRLTAFEKQVMYWLAIDREGTEVAQLQADIVPSVTAPRLLQTLESLLKRSLIERSSAGFTQQPVVMEYTSERIIQQVCREIVQQEAVLLKSHALLKAQSKDYIKETQTRLIVGPLLDRLLNHLKSKQHIETRIACLLADQREQTPLEPGYVGGNLINLLCALGTDLSDWDFSGLCVWQADLQRAPLRRTSFARADLRGSVFGQTFAGILLVAFNPEGTVLAIGDDSGEIRLLRAADGQQQARCTGHTDALCAMAFHPEGNLLASGSEDLSVKLWAAGSGQCLATLTGHTGWVYAVAFAPDGRTLASGSVDGTVRLWDVGTGLCLKILCEPGGQFWSVAFAPDGQTLATAGHGHAIKLWQVSSGACALSLEGHTAQVRSVAFSPDGRTLASAGVDGTVRLWDVPLGACLMVLEGHTSRVRTVAFSPGGHLLASGGHDQTVRLWEVRSGRCLRVLPGHTGQVWSLAFHPNGRTLASGSMDQTVRLWEVDSGRSLKTFQGNSGWIWSVAFHPGGHLLASGSMDRLVRLWDTRTGQCLKTLAGHGCWVWSLAFHPGGEILASGSFDQTVKLWEVDTGRCIQSLAGHTNWIRAVAFSPDGAQIASAGVDQTIRLWAWPAGNCTAVLTGHTGWVRCVAFGPDGRQLASGSLDRTIKIWDAATGECVATLGGHRGQICAVAFSPDGSLLASAAEDHLVKLWNLATGECVATLAGHCGPVWSVAFAPDGLHLASCGHDQVVRFWDAGSGALTATLRGHSDQVWSVAYDPRGETLASGSQDKTIRLWNPATGECLKILQAERLYEGMNIAGAVGLTESQMATLRALGAVGT

SEQ ID NO: 52363 - protein, 459 aa, Pseudomonas putida KT2440
MQQIIQTTLLIIGGGPGGYVAAIRAGQLGIPTVLVEGQALGGTCLNIGCIPSKALIHVAEQFHQASRFTEPSPLGISVASPRLDIGQSVTWKDGIVDRLTTGVAALLKKHGVKVVHGWAKVLDGKQVEVDGQRIQCEHLLLATGSSSVELPMLPLGGPVISSTEALAPKTLPQHLVVVGGGYIGLELGIAYRKLGAQVSVVEARERILPTYDSELTAPVAESLKKLGIALHLGHSVEGYENGCLLASDGKGGQLRLEADQVLVAVGRRPRTKGFNLECLDLKMNGAAIAIDERCHTSMHNVWAIGDVAGEPMLAHRAMAQGEMVAEIIAGKARRFEPTAIAAVCFTDPEVVVVGKTPEQASQQGLDCIVAQFPFAANGRAMSLESKSGFVRVVARRDNHLIVGWQAVGVAVSELSTAFAQSLEMGACLEDVAGTIHAHPTLGEAVQEAALRALGHALHI

SEQ ID NO: 52364 - protein, 456 aa, Haemophilus influenzae R2846
MTKHYDYIAIGGGSGGIASLNRAASYGKKCAIIEAKHLGGTCVNVGCVPKKVMFYGAHIAEAINNYAPDYGFDVEVKKFDFSKLIESRQAYISRIHTSYNNVLAKNNIDVINGFGKFVDAHTIEVTLADGAKEQVTADHILIATGGRPYRPNIKGQEYGIDSDGFFALTELPKRAVVIGAGYIAVELSGVLNSLGVETHLLVRRHAPMRNQDPLIVETLVEVLAQDGIQLHTNSTPSEIVKNADGSLTVKCDGQSDVTVDCAIWAAGRVPATDKIGLENAGVETNEHGYVKVDKYQNTNVKGIYAVGDIIENGIELTPVAVAAGRRLSERLFNNKPTEYLDYSLVPTVVFSHPPIGTVGLTEPQAIEQYGAENVKVYKSSFTAMYTAVTQHRQPCKMKLVCVGKDEKVVGLHGIGFGVDEMIQGFAVAIKMGATKADFDNTVAIHPTGSEEFVTMR

SEQ ID NO: 52365 - protein, 460 aa, Pseudomonas putida KT2440
MQSHGLKQSLKQRHITMIALGGVIGAGLFMGSGSLIASAGPAAILSYFIGGLVVTLVMFMLGEMACRNPDAGSFSTYANTYLGDWAGFAVGWLYWFKSMMTITLEAVLLGAILHDFLPWLPIWAGAFLMLVTLMASNAYSVRSFAEVEYWLAAMKVATILIFMLLGVSILLGLHSDIPAPGLINLTAHDGFMPNGLSPVMAGVIVVIFSLGGSEIAAVAAGESENPRQNVIRAIKSVILRVMLFYVGSVSILILCLPWTDKANLASPYVSLFSLAGFGGAAVAMKLVLFVSFMSVMNSFMFSNSRMLFSLSQRGHAPKLFSRTSAKGVPINALLLSLSICTMILTVHFVSGGDLFMTLAKSTGSLVMVVWIFIIIAHVAMRIKTRHEAVAPNAFRAWLFPYTNIIALFALLAVIGTQAFDPASRFQFWFTVLTVLLVVAGYFLMRQRLASSAVLAHERDA

SEQ ID NO: 52366 - protein, 2312 aa, ASPERGILLUS NIDULANS FGSC A4
MCLMSHASKWSAACLAADLPPSSWISEDILCTHLAEMDDSHILGEDLPLPPARLFQRLAQLPGYTWDQSIEPFHSTYNHWHVFGLRHAADTDASTPLATSSGPSSITRSSPRTDARPPFRHHWRSSLSESSSELSLSRTEHEFVWIPVVARVSSHVVRLEHCNHTIRPLDLIRLPSDPGDLGPLLVAIFESPGLNMLQELVAFGPAWFAIGGRNESVEPSPGEQVSLSVFLDFSIGACDCLELLHYGLRTVHGEIRPDAFHFNREARSVKLMNTGNGAKAFDNVLSEGWLTISREIGVKNKLQFIAPEQTGRMPTEPDSRTDIYALGVLFWTMLVGKPAFTGSDPVEVVQNVLGKRLPPVSAKRMDIPDAVSAVIQKMTHKAVNERYHTISSVKRDLTQISQLLGDGDSKALKDFQVAQRDVSSFFTLPSKMFGRQGEYDKVLSVVEKVARRQQSSYSKAATQISSRLGSNSSLSEGRVDSFDLASVSSDSGSFQLNPRTSTNGTAYNIGRASTHESFHSTESSLSTPKPVTSKPKSPVDPRQTWDNTDQDVAQSYDSPMVPISRHKNPSKFRRYGKCEVIAISGAAGIGKTDLLNRIQPAIRKLGYIGIARLDRARRVPFEPFAKVLASLLRQIFSERDVTTEYHNSVRCALRPMWSTLHRVLELPEQLMSPGTNEKQVSPKCTAAQYIFKDMTRGEPSKTPLPRLSQGQTSVDFFLTNAASKNMRLMETFLDILRTLSQFKMICVCIDDLHYADDETMELITNIVRMKIPCVLILTSRKSELESDAIKSLFENDNPSVTRIILKPLSEEEVMEIVAATMHQPPNPTLTPLAAVIQEKSVGNPFYVRMMLETCYSTNCIWYSWKNSMWEFDLDRIFTEFVAPRYGEGLGLGFITRRLQELPPAARSILVWGALLGSPFSFSLVQKLLTSEFLYSSEDDEVVDLTCPQNANLIRQSEADIVVGLQFAVQANFIIPGSTDDEFSRYAMARHVAQASRIIKSRVVERLDYRKILWDAAQIAAQSGARPTALWYYRHCLDLLQDNHWDDNGIDVYYDETLRLYTATAEMAWSQGFNSEALDLLYKIFHHAKTAVCKSRAWIIKAKLFAQLGDHPRSMNSLLTCLEELGVHLREPTSYENCDAAYKVLKGHIERADLSEMAHKSVSKDINTVTIGTVMAEAMSVTFWDDGLTFYRMAIEMMNHHLFRGGFIQICIGCSHLAMIAFSRFRDLDFAVKLSELALTLLDRCPELWTRSRGSIVYNFYVGHLRGPLASTLPALEASVETSLVLGDPYITLITISAMAMTRLFLGHDLVLVEVFCNDSPMEINDWEVDTRGGATLVAVRQVARALQGKTEYRVADTVLNDDSHITTEYIDFLEKNASNPDRPRDIYYALSMIPLYLYGHHEKAIKLATEMDESISRLWSSRVSYVVYFYAALSHLTMHNDNPTTAYLDGKLDVVLKYKAEIDFARRACDANYGMWALILEALVYEVQDDHTSALQSFEAAIDHCQVHQYPMEEALALELYGEFLVRRGAKRAARSVMQDAITAWAAISAVGKASQLTEKHEWLLRTATSCRSVDVGCQTVDSLLGIDQDVGQEHVGVNQALQEEDRKHRWLEQSGATATTAGERSLDISGVGLDIIDLSSILESSQVMSSELQIDKLMTKMIEIVLESCNGSDFAVIATNFDNHFTITAAGDLERGQRSFVDGLPFSEMDDKMAQQITHYVMRTREEVLVHNVFEDERFSNVSEAYHTRNPMSRSVIALPIMQGEHLHGVIQVEGKPNSFTQRNLVVLHLLCNQIGISLSNALLFREIRKVGATNASMVESQKRALTQARDAEQKAKVAEAEAKHNVKLKEDAAKAKSIFLANISHDLRTPMNGVIGLSELLKGTKLDREQDEYVESIRVCADTLLTLINDILDFSKLEAGKMKISTVPLNIKETISEVVRALRYTHRDRGLETIEDLDEVPPDLVVLGDPVRLHQIFMNLLSNSYKFTPKGSVTVSAKVTREGKGRVRLECSVSDTGIGIPDEQKPRLFRPFSQADSSTARSYGGSGLGLSICKAIIEDVLGGAIWLDSVPGAGTTVTFHLSFNKVKSESGDKNAPWSKSAITDKTAPRPVARDLSMIPRDQIRVCIAEDNPINQKIAVRFVTSLGLQCEAYSDGQQAVDALRARSKEGNPFHVVLMDVQMPTLDGYNATREIRKDPDPNVNEVLVIAMTASAIEGDREKCLEAGMNNYLPKPVRSNILSDMLDNYLAPVPTFTRTRMSPAARGRGSISTDSASVASNSISIASSGATSVSGSDGAGHALPEQKSQSHST

SEQ ID NO: 52367 - protein, 556 aa, Pirellula sp. 1
MSAFRLLRRSIFVKRYCVGCDHGGSRVVGNIGRLLLLILTDLRREKLMRLFSIVFCASLIWPTFSQSVLADEPTRLDPRSPRWSPLVDVIDKVEPAVVGLFLRDEKSGGFNSGSGTIIESSGYVLTNDHVLSSDTGYAVLGKVAGKFEVVGRMPEKDMAIVRLLHVKGHLPIVPLGRSNDVHNGEAVVVAGNPGGRGITITSGIVSSKKTYLDMPNALIATNYNLLARDDYLRFDAASNRGNSGGPLVNMEGKIIGIVSRVNPEEQNAGFAIPIDRVRKLIVRIVEPELRHDRWVGVSLNPLAEAAVVAAVEEGSPAAEAGILAGDVIEMVAGTRVRNAAQYTLALDRVLRESEEVELLASRRGSAIPVSMQTIPVPRLKGVEVETLEPGLDYRMYLGKFKKLPEFETMEVERTGQVDSLNLEEIQGDQRDDFALSINAMFRVPEEGLYRFQITSDDGSRVFLHDKLFLDHDGNHPPMTVSRLVRAGAGLHPIRIDYFEGGGAQTLTAALTRLDVAGDDDGDDSASETIQTPIELQFFRVPAEDSVSKPTSDAVSE

SEQ ID NO: 52368 - protein, 326 aa, Zea mays
  misc_feature (124)..(124): Xaa can be any naturally occurring amino acid
  unsure (1)..(326): unsure at all Xaa locations
MGRPPCCDKESVKKGPWTPEEDLVLVSYVQEHGPGNWRAVPANTGGYTLAVWLLRCSKSCRLRWTNYLRPGIRRGGFSDQEDRLIVHLQALLGNRWAAIASYLPDRTDNDVKNYWNTHLKKKLXLAQQQQQLRASPSPPKGQWELKLQTDINLARRALRDALSIDAGPPGMAVAGSAAPAPSAGPAAPQQAYALTARSVDRMMLDGWAAAAPAAGRRSCVVGGTVVIPAPATTPGAAESASRSSSELTTAECSASISSASDQRAAPVADHQLLASEENNYTASAVQQGEVPLSAIESWLLEDAGAGEQKLAHDGPLLDAALHSFGF

SEQ ID NO: 52369 - protein, 408 aa, Lyngbya majuscula
MNDIKITGMGIVTPIAQEVESFREALFSGKTQFGYLQRPGRESPSKKFIGAELPELDVRTLFPQHRGLLRSATWSGQVAMFAVAQAWEDAKLTSAPVKPERIGLVIGGSNLQQRHQQQTWQRYQSRPEFIRPTYGLTVWDTDILGLLSQCFPIQGEGYTVGGASASGAVAIIHGARQILTGVTDISIVVGSLFDICAYECQGLMNLGAMGSERFADSPELACRPFDHNHDGFIYGEGCGVIVLEKADSAQQRGVLSQGKLLGWGLNLAGNRSPEPSQKAEAQAMSAALAMADLKPEQIDYVNTHGTSSPIGDNTEVSALKSTGVDHCLLNSTKSLTGHCLTAAGAIEAIATLLQMNSSFCHPTHNLVDPIDDNLNWVKETAVQGEINYAISNSFAFGGINTALLLGKE

SEQ ID NO: 52370 - protein, 670 aa, Vibrio vulnificus CMCP6
MHSGADMPSRKHLANAIRALSMDGVQKANSGHPGAPMGMADIAEVLWRGHLNHNPSNPEWADRDRFVLSNGHGSMLIYSLLHLSGYELSIDDLKNFRQLHSKTPGHPEYGYAPGIETTTGPLGQGITNAVGMAMAEKALAAQFNKPGHDIVDHFTYVFMGDGCLMEGISHEACSLAGTLGLGKLIAFWDDNGISIDGHVEGWFSDDTPKRFEAYGWHVIPAVDGHNAEAINAAIEAAKADPRPTLICTKTIIGFGSPNKSGSHDCHGAPLGAEEIAAAREFLGWEHPAFEIPADVYAEWDAKAAGAEKEAAWNAKFDAYAAAYPTEAAELKRRLNGELPAEWEEKANQIIADLQANPANIASRKASQNALEAFGKMLPEFMGGSADLAPSNLTMWSGSKSLEANDFSGNYIHYGVREFGMTAIMNGIALHGGFVPYGATFLMFMEYARNAMRMAALMKVQNIQVYTHDSIGLGEDGPTHQPVEQIASLRLTPNMSTWRPCDQVESAVAWKLAIERKDGPSALIFSRQNLAQQPRSAEQVADIAKGGYILKDSDGKPELILIATGSEVELAVKAAEQLTAEGKKVRVVSMPATDTFDKQDAAYREAVLPSDVTARIAIEAGIADFWYKYVGFDGRIIGMTTFGESAPADQLFEMFGFTVENVVNTAKELLA

SEQ ID NO: 52371 - protein, 155 aa, Capsicum frutescens
YDQYKDAWDTSITIEVKVGDNIEVVRFFHCYKRGVDRIFVDHPMFLERVWGKTASKIYGPKAGQDYLDNELRFSLLCQAALEAPRVLNLNCSKSFSGPYGEDVLFIANDWHTALIPCYLKSMYQSKGIYMNAKVAFCIHNIAYQGRFSFSDFSLL

SEQ ID NO: 52372 - protein, 82 aa, Glycine max
MALSRRMAASALLLLVLLVATEMGATTVKLAEARDCLSQSHKFKGACLSSSNCAAVCRTENFPDGECHTHNFARKCFCKRAC

SEQ ID NO: 52373 - protein, 360 aa, Oryza sativa (indica cultivar-group)
MGNDEAVVTQKMGKAPSPPKDHPALSPYLDWSNMQAYYGPGILPPTFFSPGIAAGHTPPPFIWGPQPLVPSAFGKPYAAIYPPGGAFSHPFMPLMVSPLSMEPAKSVNSKDNCSNKKMKEIDGAAMSTGSGNSEKTSGDCSLEGFSDGNNQKASGTPKKRSIDDRPKSGVETGGALTPNDRPSEQAALPNLCIPVTAIKPDVSTASDFRVIATPVTEVPTKDDKESKRERRKQSNRESARRSRLRKQAETEELARKVELLTAENTSLRREISRLTESSKKLRLENSALMEKLTETGPDEAQEVPPVKTKAQQARGVENFLSMIDKTGTPRSSGHMDHAIATPKLRQLLGSGLATDAVAAR

SEQ ID NO: 52374 - protein, 376 aa, Halobacterium sp. NRC-1
MSDELKKGLEDVLVAESDLSFIDGDAGKLVYCGYAIEDLARTASYEEVLYLLWHGDLPTRSELDAFRADMASHREIDDDVLALVENLAAADADPMAALRTAASALSAHDDTAGGSDPDDARESGKRITAKLPTIVAAFTRLRNGDDVVAPRDDLGHAANFLYMLNGEAPDDVLADVFDQALVLHADHGLNASTFSGMVTASTLADVHAAVTSAIGTLSGSLHGGANANVMRMLKEVDDSDKDPLSWVQDALANGERVMGFGHRVYNVKDPRAHILSERSEELGAAAGDTKWYEMSVAIEDYMADEKGLAPNVDFYSASTYYQMGIPVDIYTPIFAMSRVGGWVGHVLEQYDDNRLIRPRARYVGAEDRDSTPLDER

SEQ ID NO: 52375 - protein, 223 aa, Ustilago maydis 521
MFARSAIPTLRAASVRAFSTQTASTGTASARRYMGAAALAAGGALTYSAFAAPTVHLEGPKTIAGELGTSTERSYVMIKPDGVSRQIVGEIISRFEKRGYQLVALKTVIPSAELAKEHYIDLAKKPFYGGLVKYITSGTPVVAMVWQGKDVIRQGRRLVGATNPLDAAPGSIRGDFCVSVGRNIIHASDSHESATKEIGLWFHEKELATEYKPIAWDMIMADN

SEQ ID NO: 52376 - protein, 155 aa, Capsicum galapagoense
YDQYKDAWDTSITIEVKVGDSIEVVRFFHCYKRGVDRIFVDHPMFLERVWGKTASKIYGPKAGQDYLDNELRFSLLCQAALEAPRVLNLNCSKSFSGPYGEDVLFIANDWHTALIPCYLKSMYQSKGIYMNAKVAFCIHNIAYQGRFSFSDFSLL

SEQ ID NO: 52377 - protein, 1189 aa, Agrobacterium tumefaciens
MICTAIRKFPGRKRRPLGASALSLRRQNPTGFSPIFGGHGVAAVYDSGKSGPAILIRSELDALPIHEKSEADYRSRTDGKGHLCGHDGHSTILTALALGLSRQRPQTGRVILLYQPAEETGAGAAAVLADPRFHEIKPDYSFSLHNLPGLPLGHVSVLEGPVNCASRGIKIRLSGKTAHASSPEHGVSPMQAISLMMPALAELGSGFPPEPDFSMVTITHAVMGEAAFGISPADAEIWATLRTLTDDRMEKLCTAAESLAKKVAGEQQLTLDIAYDDIFLHCENAPEAVAHIRRALDEEKIPYNSEALPMRPSEDFGRFRAVSSSAMFFLGAGRDYPNLHNPDYDFPDTLIGIGARIFMRIIRNLTRRGIATTSLPPVSATALRAVARSGRAHGRQPLDAVLIPDGCQAFENLGRLAIPAHGKIGIATQHHQVRSLVCQPRPLVEQQKRFRIPFRLEGGDRPVGQDRDLQFGRTRAIHARFRCRDGCMVRQPHAQISKALAIGRVAFHRRLAAFNRGFESFQSLCRTVRFHQAPAEIERLLRRQTLWVGIGRAGAWTGGGAGFPLRLHRPARLLARRFGLLLDDRLVIDHRRSALRRIGRRGRRHLLGKGRCAHGGNNLPGLIHHPRRANIGNTLRAARPLLLYATQTGQITQIVITDGHAIGRRLIIGFPAKGRAEPLQSKRCLPESKRIPAELLRGGRILARHRLPRQCAAARQAAERLVAAGPEDWPWRQDRSQAHHLNDVRHLYMTSFGLARLITVDQRQRQTLRGRSAVFFLTRLAEPLFRFCHVLLADVVPAEQQGVTCKLVGLGKSFKPHQIGGRNGDAFLFALFRFFSGLCHELSGEIVLDRLEFQLTVGTRFFLGQQLAHHLRRQKRGCLLHRREPVAGGRAIVEDVKISVARPSHPVAIGEGIGDPPQDIDLAAGQQGGIVRGGIHDRRILLEIGRIDEPLAGFGKREHANEIVGWLPAGFGLLAIGNRLAHFGITAIGIKLPHGVELGIAVFGNGERIGRRRPVGIKRAKTRDFGLKPLGIPTGCKIAQRAEDRLPGISAEAGCGVRGACAVCIWGACPPACITGSGSLAGTVTGGVVTGVVACAISRFLTKALICAGLAAGEMRGVARLSPTADVCTSDTRPRMLSRQWKAASAIRSRMRAEVDSGLFIGIPRYSLPETTMPEDAMWKDNKVLAGNF

SEQ ID NO: 52378 - protein, 149 aa, Capsicum annuum var. glabriusculum
  misc_feature (5)..(5): Xaa can be any naturally occurring amino acid
  unsure (1)..(149): unsure at all Xaa locations
AWDTXITVEVKVGDNIEVVRFFHCYKRGVDRIFVDHPMFLERVWGKTASKIYGPKAGQDYLDNELRFSLLCQAALEAPRVLNLNCSKSFSGPYGEDVLFIANDWHTALIPCYLKSMYQSKGIYMNAKVAFCIHNIAYQGRFSFSDFSLL

SEQ ID NO: 52379 - protein, 638 aa, Magnetospirillum magnetotacticum MS-1
MCGFAGFLDLTQATPDRERVVRAMAATLLHRGPDDDGAWVDDGAGVALGFRRLAIIDLSPQGHQPMTSHDGRWVISFNGEIYNHEALRARLGEDIGWRGHSDTEVLLQAVSAWGMERALAEFDGMFAFALWDRQDRVLTLARDRFGEKPLYWTQSGGHLLFGSEIKALRAHPAWTGGIDRDALALYMRLGWITAPHTIHSGVFKLEPGHVMRVSEGQISTQAYWSAAECAAGVENGFTGNAEAAADRLEELLRQSVRLRMQADVPVGVFLSGGIDSSITAALMRQLSSEPVHSFTIGFDQSGLDESPHARAVADHLGTIHTEVRISDAEALAQVPRLPLLYDEPFADAAALPTALLAQVTRKSVTVALSGDGADELFGGYGIYRSIPKDWGRLRGLPGGLKSLGALGARQLAEPAEGLAALAGRFAKRRSHPGHRLRREAERLEVQSLAGLLGLHYSRWRGMPALVPGAREAQSLFSAPTPALKDDALATMVLDACGYLPDDLCVKTDRATMGASLEARLPFLALEIAQFAWSLPTGLKIEGETGKAVLRRVLYRHVPRALVDRPKMGFEVPLRRWLNGQLRDWADDLLSEDRLRRQGFLDTALVAQCWREHRSGAKNWQNEIWHALMFQAWLDSVNP

SEQ ID NO: 52380 - protein, 376 aa, Bacillus anthracis str. A2012
MAVSKFVQIRRDLHKIPEIGFKEWKTQQYILDYIGTLSNEHVEVKVWRTGVIVKVKGKNPEKVIGYRADIDGLPITEETGYEFASVHEGMMHACGHDLHTTIGLGLLTAAVTERIDDDLVFLFQPAEEGPGGALPMLESEELKEWKPNIILGLHIAPEYPVGTIATKEGLLFANTSELYVDLKGKGGHAAYPHTANDMIVAASHLVTQLQSVISRNVNPLDSAVITIGKITGGTVQNIIAEKSRLEGTIRTLSVESMSRVKSRIEAIVAGIEASFQCEAVIDYGAMYHQVYNHEALTREFMQFVSEQTDMKVITCTEAMTGEDFGYMLQEIPGFMFWLGVNSEYGLHHAKLRPDEEAIEKAIVFLDQYVKWKGTRK

SEQ ID NO: 52381 - protein, 155 aa, Capsicum annuum var. annuum
YDQYKDAWDTSITVEVKVGDNIEVVRFFHCYKRGVDRIFVDHPMFLERVWGKTASKIYGPKAGQDYLDNELRFSLLCQAALEAPRVLNLNCSKSFSGPYGEDVLFIANDWHTALIPCYLKSMYQSKGIYMNAKVAFCIHNIAYQGRFSFSDFSLL

SEQ ID NO: 52382 - protein, 426 aa, Frankia sp. CcI3
MGVPGDSERRTDGRPQVEPQVEPTVVAWDPVMAGYDFGPTHPLHPVRLELTMDLAMSLGVLDAPGIRISRPTLASDDLIGLIHDPVYLSAVRAAPDPAQARFAALFGLGTADNPIFERMHEAAALITGGTIEAARAVWSGPPRHAVSIAGGLHHAMPGMASGFCIYNDPAIAIAWLLSAGAARVAYVDVDVHHGDGVQTAFYDDPRVLTISLHQTGSTLFPGTGFPTEVGAPAAEGTAVNVALPPATGDAGWLRAFSGVVPVLLRSFRPQVLVTQHGCDTHAFDPLADLALSVDGQRASYDLLHALAHEVCDGRWLACGGGGYALDTVVPRAWTQLLAIAGHVPLDAGRALPEDWRSAAPGRVRAATGQKSVGAAAMPRTLGDGVSVRYRPWDAGEGDPDDPLDRTVAATRRQVLPLHGLDPTVDR

SEQ ID NO: 52383 - protein, 231 aa, Leptospira interrogans serovar lai str. 56601
MSRKNISLTESLEEYIFRNSVREPDSFLKLRKETGTLAQANMQISPEEGQFLNILTKISGAKRIIEIGTFTGYSSLCFASALPEDGKILCCDVSEEWTNVARKYWKENGLENKIFLKLGSALETLQVLIDSKSAPSWASDFAFGPSSIDLFFLDADKENYPNYYPLILKLLKPGGLLIADNVLWDGSVADLSHQEPSTVGIRKFNELVYNDSLVDVSLVPIADGVSLVRKR

SEQ ID NO: 52384 - protein, 330 aa, Bacillus subtilis subsp. subtilis str. 168
MSTNRHQALGLTDQEAVDMYRTMLLARKIDERMWLLNRSGKIPFVISCQGQEAAQVGAAFALDREMDYVLPYYRDMGVVLAFGMTAKDLMMSGFAKAADPNSGGRQMPGHFGQKKNRIVTGSSPVTTQVPHAVGIALAGRMEKKDIAAFVTFGEGSSNQGDFHEGANFAAVHKLPVIFMCENNKYAISVPYDKQVACENISDRAIGYGMPGVTVNGNDPLEVYQAVKEARERARRGEGPTLIETISYRLTPHSSDDDDSSYRGREEVEEAKKSDPLLTYQAYLKETGLLSDEIEQTMLDEIMAIVNEATDEAENAPYAAPESALDYVYAK

SEQ ID NO: 52385 - protein, 232 aa, Zea mays
MVRGKTQMKRIENPTSRQVTFSKRRNGLLKKAFELSVLCDAEVALVVFSPRGKLYEFASGSAQKTIERYRTYTKDNVSNKTVQQDIERVKADADGLSKRLEALEAYKRKLLGERLEDCSIEELHSLEVKLEKSLHCIRGRKTELLEEQVRKLKQKEMSLRKSNEDLREKCKKQPPVPMASAPPRAPAVDNVEDGHREPKDDGMDVETELYIGLPGRDYRSSKDKAAVAVRSG

SEQ ID NO: 52386 - protein, 457 aa, Bacillus subtilis subsp. subtilis str. 168
MATEYDVVILGGGTGGYVAAIRAAQLGLKTAVVEKEKLGGTCLHKGCIPSKALLRSAEVYRTAREADQFGVETAGVSLNFEKVQQRKQAVVDKLAAGVNHLMKKGKIDVYTGYGRILGPSIFSPLPGTISVERGNGEENDMLIPKQVIIATGSRPRMLPGLEVDGKSVLTSDEALQMEELPQSIIIVGGGVIGIEWASMLHDFGVKVTVIEYADRILPTEDLEISKEMESLLKKKGIQFITGAKVLPDTMTKTSDDISIQAEKDGETVTYSAEKMLVSIGRQANIEGIGLENTDIVTENGMISVNESCQTKESHIYAIGDVIGGLQLAHVASHEGIIAVEHFAGLNPHPLDPTLVPKCIYSSPEAASVGLTEDEAKANGHNVKIGKFPFMAIGKALVYGESDGFVKIVADRDTDDILGVHMIGPHVTDMISEAGLAKVLDATPWEVGQTISPASNAF

SEQ ID NO: 52387 - protein, 465 aa, Frankia sp. CcI3
MVGPAIADVRVCLHGEWFRVFVRYLPRAQNETTHPHRPSDLPLMTLPALELAERTDDNRPRSPRRARRAAPPVRTAPSRSLAAVPDDTDELDVSAVAEVIARGREAGEISRSELRDVLESADIGIELLPALIARLNAVGIELLDEEEASDDATAASRSTAEHAGTADLVRMYLREIGKVPLLNAAQEVELSKRVEAGLFAEYKLESVPDLPADLRRDLGLLVKDGHAAKQQLVSANLRLVVSVAKKYSGRGMTLLDLVQEGNLGLIRAVEKFDYAKGYKFSTYATWWIRQAIGRALADQARTIRIPVHVVEQINKITRLQRQLVSTLGREPTDEELALELDMPIEQVVELRRYAQDTVSLETSVGDDGDSVLGDFIEDSDATSPADAASYGAMQDEIENVLGGLSPREREVMRLRFGLADGKQHTLAEVGNRLGLTRERIRQIERDTLRELRKPAVAGRLREFLD

SEQ ID NO: 52388 - protein, 137 aa, Leptospira interrogans serovar lai str. 56601
MKVCANQKFDGKILCCDISEEWTNVARKYWKENGLENKIFLKLGSALETLQVLIDLKSAPTWASDFAFGPSSIDLFFLDADKENYPNYYPLILKLLKPDGLLIADNVLWDGSVADLSHQEPSTIGILFLFFQRSHFH

SEQ ID NO: 52389 - protein, 364 aa, Bacillus subtilis subsp. subtilis str. 168
MELFKYMEKYDYEQLVFCQDEQSGLKAIIAIHDTTLGPALGGTRMWTYENEEAAIEDALRLARGMTYKNAAAGLNLGGGKTVIIGDPRKDKNEEMFRAFGRYIQGLNGRYITAEDVGTTVEDMDIIHDETDYVTGISPAFGSSGNPSPVTAYGVYRGMKAAAKAAFGTDSLEGKTIAVQGVGNVAYNLCRHLHEEGANLIVTDINKQSVQRAVEDFGARAVDPDDIYSQDCDIYAPCALGATINDDTIKQLKAKVIAGAANNQLKETRHGDQIHEMGIVYAPDYVINAGGVINVADELYGYNAERALKKVEGIYGNIERVLEISQRDGIPAYLAADRLAEERIERMRRSRSQFLQNGHSVLSRR

SEQ ID NO: 52390 - protein, 318 aa, Triticum aestivum
  misc_feature (11)..(11): Xaa can be any naturally occurring amino acid
  unsure (1)..(318): unsure at all Xaa locations
TDGMIVILLDXLLQKGYGLGSGISLFIATNICESIMWKAFSPTTINTGRGPEFEGAVIALFHLLFTWPNKQRALQEAFYRQNLPNIMNLLATIAVFAAVIYLQGFRVEIPVKSSRQRGARGSYPVRLFYTSNMPIMLQSALSSNVFLISQMLYSRFSENLLVRLFGVWEAKDGSSQLHAASGLVYYMSPPQSMKDALLDPIHMSAYIIYMLGACALFSKTWIEVSGSSPRDVAKQLKDQGLVMAGHRDQSMYKELKRIIPTAAAFGGACIGALSVTSDLLGALGSGTGTLLAVTIIYGYFEIAAKEGDMSGMKGMIMG

SEQ ID NO: 52391 - protein, 103 aa, Gloeobacter violaceus PCC 7421
MATITVAASSLKPLGDRVLVKVLAQEEKTAGGILLPDTAKEKPQVGEVTAVGEGRITDKGDRLPLEVKVGDKVLYAKYAGTELKVAGEEYILLAEKDILAITL

SEQ ID NO: 52392 - protein, 374 aa, Zea mays
MGMAMPFASPSPAADHRPSSLLPFCRAAPLSAAGEDAAQQHAMSGRWAARPALFTAAQYEELEHQALIYKYLVAGVPVPPDLLLPLRRGFVFHQPPALGYGPYFGKKVDPEPGRCRRTDGKKWRCSKEAAPDSKYCERHMHRGRNRSRKPVEAQLAPPPHAQPQQQQQAPAPAAGFQNHSLYPSILTGNGGGGLGAGAGGGTFGLGPTSQLHMDSAAAYATAAGGGSKYLRYSAYGVKSLSDEHSTLLSGGMDPSMMDNSWRLLPSQTNTFQATSYPVFGTLSGLDESTIASLPKTQREPLSFFGSDFVTAAKQENQTLRPFFDEWPKSRDSWPELGEDSSLGFSATQLSISIPMATSDFSNTSSRSPGGIPSR

SEQ ID NO: 52393 - protein, 117 aa, Streptococcus constellatus subsp. pharyngis
MTKIYDFSIFDQNNRSISLEIYKGNVLLIVNTATGCGLTPQYKGLQHLYTRYQNQGFEILDFPCNQFMGQAPGTAEEINRFCSLHYQTTFPRFAKVKVNGKEADPLYIWLKEQQAGP

SEQ ID NO: 52394 - protein, 99 aa, Caulobacter crescentus CB15
MKFRPLGDRVLVKRVEEETKTKGGIIIPDTAKEKPQEGEVVRSGPGARNEHTSSPLDVKAGDRILFGKWSGTASEGTKVKVTSDLLIMKESDVLGVVEA

SEQ ID NO: 52395 - protein, 638 aa, Streptomyces verticillus
MRPVCGIVAIRSADGGLDGGELTAPMADLRPRGPDGEGTWVSPTGRAALGHTRLAVIAPDAGRQPVAGPDGTVRLVVNGEFYGYREIRAELRAAGCRFRTGSDSEIALHLYLRDGRRALERLRGEFAFVLWDERRATLFAARDRFGVKPLYYTERDGRLYVASTVRALLSCGAPARWDTAAFAAHLQLGLPPDRTLFAGIRQLPPGCHLIADAHGTRVTPYWDLDYPPAGELAARGSLDDHLDAVRERTDEAVRLRTVADVPLACHLSGGLDSSAVAASAARHTRLTAFTVRFDDPAFDESAVARRTAAHLAIDHREVASERAHFADHLRDVVRAGEMVQENSHGIARYLHSAHIKKAGFTAVLAGEGGDELFLGYPQFRKDLTLSLSADARDKADRGYARLVAAGLLPPYLRTLLGTLGFLPSWIVDRHLAVTQPVAALLRPDFAAELARADAAAPLLAAGAGLLAGRAPAHQATYLFAKTWLPGYLLAAERLDAAQAVEVRLPLFDHHLFDLVRHTPPAWYDKDGTGKYPLRAAMRHRLPREVTEGRKQGFLAPPMADDDTLLDALRERLAGPGAGDDPFFDPHAVRALLDRLAAAPPGQRSGGEKLLQLVASTAELADEFGLTTAPSGQKGGNGG

SEQ ID NO: 52396 - protein, 511 aa, Crocosphaera watsonii WH 8501
MEPRQELNSIVVTTEQMANIEGKIFAGGMPVAALMEKAALLTSQRIQQLYPLHTVDKVGVLVGPGHNGGDALVIARELHLQGYDVCVYCPFTKLKELTQQHANYAHSLGIPYHNDLESLNHCQLIIDGLFGFGLKRPLSGNLAIDVDRLNQWSIPVVSVDIPSGLHTDTGEVLGTAVKATHSLCLGLWKPVYFQDQALAYTGIAEKIDFGIPLKDIFSTIPQPIPLQLLHKTLALGFLPLPRPQLTHKYQQGHLLLIAGSHRYAGASILSSNGAKASGVGMLSVAVPESLKPLLVGKIPDGLVIDCPVSEKGVIASLPPLATDFASYDIIACGPGLTREATEVVTRVLEAKCPLVLDADALNILAQLGTVNRLSKRQNATVLTPHLGEFKRLFPDIHNPEKDRISATKQAASQSGAIILLKGARTIIANPQGKIWIIPESTPALARGGSGDVLTGLIGGLLAQNKTTNHTLEAMVATAAWWHAQAAILAAKERSELGVDAGTLSQYLHTIF

SEQ ID NO: 52397 - protein, 129 aa, Salmonella enterica
GHLNPAVTIALWLFACFPKQKVLPYIIAQFAGAFGGALLAYVLYSSLFTEFETAHHMVRGSVESLQLASIFSTYPAAALNVWQAALVEVVITSILMGMIMALTDDGNGIPKGPLAPLLIGILVAVIGAS

SEQ ID NO: 52398 - protein, 181 aa, Methanosarcina barkeri str. fusaro
MEENQNAELNPDYFENPGSDLKKATFAAGCFWGIEEAFRQVKGVVATAVGFSGGHFERPTYEQVCTLDTGHAEAVRVIFDPKVVSYETLLDVFWKIHDPTTKDRQGPDVGKQYRSVIFYHDEKQKASALASKEKLEKSGVFKNPIVTEVVPVSEFYMAEEYHQQYFEKKGFLQNILRGLKK

SEQ ID NO: 52399 - protein, 338 aa, Zea mays
  misc_feature (273)..(273): Xaa can be any naturally occurring amino acid
  unsure (1)..(338): unsure at all Xaa locations
MAKEPMRVLVTGAAGQIGYALVPMIARGVMLGADQPVILHMLDIPPAAEALNGVKMELVDAAFPLLKGVVATTDVVEACTGVNVAVMVGGFPRKEGMERKDVMSKNVSIYKTQASALEAHAAPNCKVTQFSHVLVVANPANTNALILKEFAPSIPDRNVTCLTRLDHNRALGQISERLSVQVSDVKNVIIWGNHSSTQYPDVNHATVKTSTGEKPVRELVADDEWLNGEFITTVQQRGAAIIKARKFSSALSAASSACDHIRDWVLGTPEGTXVSMGVYSDGSYGVPSGLIYSFPVTCSGGEWKIVQGLPIDELSRKKMDATAQELSEEKSLAYSCLE

SEQ ID NO: 52400 - protein, 598 aa, Magnaporthe grisea 70-15
MIPAATPAHPVVRGFQTNTQSVSCDEDSEHGVRATKSNGTATTSTLPPRTPQRGRQPRTPVINDIVSANCSPVLKAVPSPGMSGIAMLRSKMEPLSLDITATPSRASSMSRSNSRITSPFPFPMGPPPVAAPMSRRTSILSNVTSRAQSRERPGSSRGSTSGDDTASVATTSYEIDFVDDFCSAETSEEVVKAFAEPKAGSPLYSDGVEGGLVKEQRGKITADEFEQVRCLGKGAYGTVILVKQRSTGRLFAQKQLKKASLTVSKKYVQQAKTERQVLETVNRHPFVVKLFYAFQDHEKLYLILEYGQGGELFHHLDTEKLFSEDVAAFYMGEMVLALFHLHQDLGVVYRDLKPENCLLDAEGHLLLTDFGLSKVAVDEDDHCNSFLGTIEYMAPEIILGKKYSKAVDWWALGALGHDLMTGNPPFRGANHAKIQDNIVKQKLMLPYFMSSDAKDLLTRLLRKDPAKRLGSQMPKDLNLIKKHRFFRKIDWVKLSKREMEPPIRPLITDPELAENFAPEFTELSLSPVVTTKEPGSWGGDRVAVPSTEALSPDSASRPGAIPFTTAKATTSPEDPFGGFSYMAPSSLLERSGFLTAAH

SEQ ID NO: 52401 - protein, 463 aa, Salmonella enterica subsp. enterica serovar Typhi Ty2
MSVNAIEPADAQPVAQTQNSELIYRLEDRPPLPQTLFAACQHLLAMFVAVITPALLICQALGLPAQDTQHIISMSLFASGVASIIQIKAWGPVGSGLLSIQGTSFNFVAPLIMGGTALKTGGADVPTMMAALFGTLMLASCTEMVLSRILHLARRIITPLVSGVVVMIIGLSLIQVGLTSIGGGYAAMSDNTFGAPKNLLLAGVVLAIIILLNRQRNPYLRVASLVIAMAAGYLLAWFMGMLPENNAPVSQDILMVPTPLYYGLGIDWNLLLPLMLVFMITSLETIGDITATSDVSEQPVSGPLYMKRLKGGVLANGLNSFVSAVFNTFPNSCFGQNNGVIQLTGVASRYVGFVVALMLIVLGLFPAVSGFVQHIPEPVLGGATLVMFGTIAASGVRIVSREPLNRRAILIIALSLAVGLGVSQQPQILQFAPEWVKNLLSSGIAAGGITAIVLNLILPPEKP

SEQ ID NO: 52402 - protein, 155 aa, Capsicum annuum var. annuum
YDQYKDAWDTSITVEVKVGDNIEVVRFFHCYKRGVDRIFVDHPMFLERVWGKTASKIYGPKAGQDYLDNELRFSLLCQAALGAPRVLNLNCSKSFSGPYGEDVLFIANDWHTALIPCYLKSMYQSKGIYMNAKVAFCIHNIAYQGRFSFSDFSLL

SEQ ID NO: 52403 - protein, 138 aa, Capsicum annuum var. annuum
VKVGDNIEVVRFFHCYKRGVDRIFVDHPMFLERVWGKTASKIYGPKAGQDYLDNELRFSLLCQAALEAPRVLNLNCSKSFSGPYGEDVLFIANDWHTALIPCYLKSMYQSKGIYMNAKVAFCIHNIAYQGRFSFSDFS

SEQ ID NO: 52404 - protein, 351 aa, Bordetella pertussis Tohama I
MKRTALIAGPYGIVGNALVQHLARDAAWDVVTISRRQEAALPGVRHIAADLLDAAQAEAALAAFPGITHVFYCAYAPRPTLGEEAAPNLAMLANLVSAVDRHARGLERVVLVHGTKWYGNHLGPFRTPAREDDARHCPPNFYYDQQDWIAARQRESGRWSWTAFRPHGIFGYALGSPMNHLMALSLYASVMKAVATPLKFPGTPAAFAALNQCTDARLLARAMAWSVDVAACENEAFNFHNGEPERWANLWPAVAEAFGMQAGGVQQIRLAAMMPANEAAWQAICQRQGLRHFPLEAYVNWSFADWVYSNGFDQVCSLYKLRRAGWTEILLFDDMLKSMLSDLRQRKLLPA

SEQ ID NO: 52405 - protein, 319 aa, Klebsiella pneumoniae
MLSKQALLQAYRKMREIRTFEERLHQENTSGDIPGFIHLYTGEEAIAVGVCENLTSADFIGSTHRGHGHCIAKGCDIHGMMAEIFGKDSGLCRGKGGSMHIADLSKGMLGANAIVGGAPPLAIGAALTAKTLKTGNVGVSFTGDGGSNQGLVFEAINMAVVLQLPAVFIFENNGYGEGTGHDYAVGGRDIARRAAGFGLPAVTVDGTDFFAVYEATSEAVKRAREGGGPSVIEAKAFRWHGHFEGDPALYRAEGEVQRLREQHDPLKIFTAKVKQHITQEELAAIDEEVEALVNDAVLKARAAAYPAPEDLLTDVYVSY

SEQ ID NO: 52406 - protein, 769 aa, Neurospora crassa
MVQSSVLGFPRMGVLRDLKKANEAYWADKISQEALLAEGKRLRLAHWKIQKDAGVDIIPSNDFAHYDHVLDHIQLFNAVPERYTSQKLSPLDEYFAMGRGHQKGGVDVPALEMVKWFDSNYHYVKPTLQDNQTFSLAKDPKPVREFLEAKEAGFQTRPVLVGPVSFLALGKADRGSSVDPITLLDKLVPVYVELLKQLKAAGAESVQIDEPVLVFDLRPEVKAAFKPAYEAIAAAGDAVPKVVVATYFGDIVHNFDVLPAFSGAAGLHVDLVRNPEQLEPVLKQLGPNQILSAGVVDGRNIWKNDFAKSLEILQTAVKALGSERVIVATSSSLIHTPHTLASEKKLPSDVYEWFSFAVEKVKEVATLAKAVTEPEAVKAELEANAAAIKARTDSKRTNDPAVKERQAQVTPEQHNRKAPFNTRYAEQKKHLSLPLFPTTTIGSFPQTSEIRVQRNKFTKGEISAEEYERFIEKEIELAVKIQDELDLDVYVHGEPERNDMVQYFGERLNGYVFTTHAWVQSYGSRCVRPPIIVGDISRPAPMTVKESKYAASISKKPMKGMLTGPVTCLRWSFPRVDVHQSVQCQQLALALRDEVVDLEKNGIYVIQVDEPALREGLPLRKGQEREAYLKWAVDSFKLATAGVENSTQIHSHFCYSEFQDFFHAIAALDADVLSIENSKSDAKLLKVFIDEEYPRHIGPGVYDIHSPRVPTLEEFKQRIEEMLAYLKPEQLWINPDCGLKTRKWDEVKGALSHMVEAAKYFREKYANKA

SEQ ID NO: 52407 - protein, 224 aa, Streptomyces avermitilis MA-4680
MSESQQLWDDVDDYFTTLLAPEDEALTAALRDSDAAGLPHINVAPNQGKLLQLLAEIQGARRILEIGTLGGYSTIWLGRALPRDGRLISFEYDAKHAEVARRNLARAGLDGISEVRVGPALESLPKLADERPEPFDLVFIDADKVNNPHYVEWALKLTRPGSLIVVDNVVRGGGVTDAGSTDPSVRGTRSALELIAEHPKLSGTAVQTVGSKGYDGFALARVLP

SEQ ID NO: 52408 - protein, 124 aa, Ashbya gossypii ATCC 10895
MAIGYSMYIERPVPDTTSAKNKYAKMAIYGCAHCKTHLSSSNYFMSDDYRGRTGAAYLMQKVINVMEGRRETRCMSTGRYVVCDIYCHTCKNLVGWKYLLSEKRDQEYKEGKYILELEPITECD

SEQ ID NO: 52409 - protein, 141 aa, Neurospora crassa
MQNSMSQAYAAPPSIPNTSTEKPHYDAPTAATAGTTYPQADPTTGATAAAGTTPATNRPTTASTYGNEKSVATTPAVTKTRFGASDIILFILAIFIPPLAVFLDRGFKVDFWINILLTILAWFPGVIHAWYVLFRHPTGRD

SEQ ID NO: 52410 - protein, 219 aa, Neurospora crassa
MLTTTASSAAAVARQLTTRRVIAPSFVSQAIRTYATPAGPPPKGFRIPTPKTWDQEEEHVLDKNGRYFLLTEMFRGMYVAMEQFFRPPYTIYYPFEKGPISPRFRGEHALRRYPSGEERCIACKLCEAVCPAQAITIEAEERADGSRRTTRYDIDMTKCIYCGFCQESCPVDAIVESPNAEYATETREELLYNKEKLLSNGDKWEPELAAAIRADSPYR

SEQ ID NO: 52411 - protein, 140 aa, Rhodovulum sulfidophilum
MAIQRTFSIIKPDATKRNLTGAINAKLEAAGLRIVAQKRIHLSKAQAAVFYAVHKERPFYDELCEFMASEPIVVQVLEGEDAIAKNREVMGATNPAEAAEGTIRKEFALSIGENSVHGSDAEDTAKEEIAYFFSGLELVG

SEQ ID NO: 52412 - protein, 372 aa, Bacillus subtilis subsp. subtilis str. 168
MEEKQHYSPGLDGVIAAETHISYLDTQSSQILIRGYDLIELSETKSYLELVHLLLEGRLPEESEMETLERKINSASSLPADHLRLLELLPEDTHPMDGLRTGLSALAGYDRQIDDRSPSANKERAYQLLGKMPALTAASYRIINKKEPILPLQTLSYSANFLYMMTGKLPSSLEEQIFDRSLVLYSEHEMPNSTFAARVIASTHSDLYGALTGAVASLKGNLHGGANEAVMYLLLEAKTTSDFEQLLQTKLKRKEKIMGFGHRVYMKKMDPRALMMKEALQQLCDKAGDHRLYEMCEAGERLMEKEKGLYPNLDYYAAPVYWMLGIPIPLYTPIFFSARTSGLCAHVIEQHANNRLFRPRVSYMGPRYQTKS

SEQ ID NO: 52413 - protein, 357 aa, Fusarium lateritium
MAITKYKAAAVTSEPGWFDLEGGVRKTIDFINEAGEAGCKFVAFPEVWIPGYPYWMWKVTYLQSLPMLKRYRENSMAVDSEEMRRIRRAARDNQIFVSLGFSEIDHATLYLSQVLIGPDGARHQPPPQDQAPLMLRSSFTVMDPVTPSCLSVRLRLAASGQLNCWENMNPFLKSLNVSAGEQVHVAAWPVYPGRSARFTPTLLPTMPIQPLTWLLLSMLSRLARGLLLPSSVSRLEGLKINTPEGVEPETDPSVYNGHARIYRPDGSLVVKPEKDFDGLLFVDIDLNECHLTKVLADFAGHYMRPDLIRLLVDTRRKKLITEADPNGSIATYSTRQRLGLDSLFRRRREMRQLTCSE

SEQ ID NO: 52414 - protein, 381 aa, Schizosaccharomyces pombe
MSDDSHLETKVVTDGTTGEKKTISYEPCRVLGSGSFGVVIQAKLVGTPGFIAVKRVLQDKRYKNRELQIMRAISHPNIIKLIAFFHTHNPSKDETHLCLLLEYMPETVFDDMRWYTRRRKSIPNLSIKLYAFQLFRALAYLHSTGVCHRDIKPQNLLVDYKTGILKLCDFGSAKVLVPSEPNVSYICSRYYRAPELVFGATHYTTKIDVWSAACVIAELFIGRPLFPGDSSVEQLVEIIRVLGTPSYHEISVMNPNYVNHSLPNVRPHTLESVMPHNCTKNAMDLLHKMLTYVPSKRISAIEVLTHPFFDELRDPNCMYHCSRDEGTIERHLPPLFNFNLAELSIRPNLNKAILPPHVYESLDVDINNFEPIVVKQADADS

SEQ ID NO: 52415 - protein, 368 aa, Gloeocercospora sorghi
MPINKYKAAVVTSEPVWENLEGGVVKTIEFINEAGKAGCKLIAFPEVWIPGYPYWMWKVNYLQSLPMLKAYRENSIAMDSSEMRRIRAAARDNQIYVSIGVSEIDHATLYLTQVLISPLGDVINHRRKIKPTHVEKLVYGDGSGDSFEPVTQTEIGRLGQLNCWENMNPFLKSLAVARGEQIHVAAWPVYPDLSKQVHPDPATNYADPASDLVTPAYAIETGTWVLAPFQRISVEGLKRHTPPGVEPETDATPYNGHARIFRPDGSLYAKPAVDFDGLMYVDIDLNESHLTKALADFAGHYMRPDLIRLLVDTRRKELVTEVGGGDNGGIQSYSTMARLGLDRPLEEEDYRQGTDAGETEKASSNGHA

SEQ ID NO: 52416 - protein, 431 aa, Methylococcus capsulatus str. Bath
MKFPVAMMRVLALSGLTWPVLAAPEGPNAADTAWILTSTGLVLFMTMPGLALLYAGLVRTKNVLSVMVQIFTATSLVSVLWVIAGYTLALTDGGELQAWIGGGKRLFLLGLKADSLNGNLPEVVYCMYHLTFAIFAPALMLGAIVERMKFSVTLWFTGIWTLLVYVPVCHWVWGEGWLARIGAIDFAGGVVVHTTAGVSALVGAWMLGPRRGYPRTLLPPHNLTLTAIGAGILAVGWHGFSAGSALMATGAAGMAMLTTHIGASVGALVWMAVEWRSFGKPTLLGALTGMIAGLGVISPAAGFVGPLGAIAMGTAAGVICFGAIHWIKRSLQIDDTLDVFPVHGVGGMIGTVLTAPFAAEALGGAGITTGLTIGQQTLTQILAVGSVAAWSGLISWLLLKILDRTIGLRVTPDQETEGLDVALHNSKAYHF

SEQ ID NO: 52417 - protein, 285 aa, Arabidopsis thaliana
MALFDTHNTWAFVFGLLGNLISFAVFLSPVPTFYRICKKKTTEGFQSIPYVVALFSAMLWLYYATQKKDVFLLVTINSFGCFIETIYISIFVAFASKKARMLTVKLLLLMNFGGFCLILLLCQFLAKGTTRAKIIGGICVGFSVCVFAAPLSIIRTVIKTKSVEYMPFSLSLTLTISAVIWLLYGLALKDIYVAFPNVIGFVLGALQMILYVVYKYCKTPSDLVEKELEAAKLPEVSIDMVKLGTLTSPEPVAITVVRSVNTCNCNDRNAEIENGQGVRNSAATT

SEQ ID NO: 52418 - protein, 417 aa, Nocardia farcinica IFM 10152
MGHVSPHLPHRPPRVLEQSTKLQNVVYEIRGPVHAHAARLEAEGHRILKLNIGNPAPFGFEAPDVIMRDIIAALPYAQGYSESKGILSARRAIVTRYELVPGFPEFDVDDVYLGNGVSELITLTMQALLDNGDEVLIPAPDYPLWTAMTSLAGGTPVHYLCDESNGWQPDIADIEAKITDKTKALLVINPNNPTGAVYSAEVLQQIVDLARKHQLLLLADEIYDKILYDDAKHISLATLAPDLLCLTFNGLSKAYRVAGYRSGWMVITGPKEHATGFLEGIDLLATSRLCPNVPAQHAIQVALGGHQSIEDLILPGGRLLEQRDVAWERLNMIPGVSCVKPKGALYAFPRLDPEVYEIHDDSKLILDLLLQEKILMVQGTGFNWPAHDHLRIVTLPWARDLAVAIERFGNFLASYRQ

SEQ ID NO: 52419 - protein, 322 aa, Rubrivivax gelatinosus
MVTRRDAHDGPAEGSDTFEPGASPEVPEAAEAPAQVPADGEGEHGNTLQSYLRDIRRAPLMSAEEEHATAVRARAGDFAARQAMIERNLRLVVSIAKHYVGRGMPMIDLIEEGNLGLMHATGKFEPERGFRFSTYASWWIRQSIERAIMHQARLIRLPVHVVRELNQVLKARRALESARRGEAERPVSVDEVAAALQRPVEEVAELLKLAEQPTSLDMPLERESGESMLDTVADEDAIDPLGLTLSREAVHLLDNGLAELNEREREVLAGRFGLRDREPETLEELAARLGLTRERIRQIQQEALLKLKRRMVRRGVDRDALF

SEQ ID NO: 52420 - protein, 148 aa, Helianthus annuus
MEQTFIMIKPDGVQRGLVGEIIGRFEKKGFTLKGLKLLTVDQAFAEKHYADLSAKPFFNGLVEYIISGPVVAMVWEGKNVVTTGRKIIGATNPAESPPGTIRGDFAIDIGRNVIHGSDAVESAKKEIGLWFPEGVANWSSSLHPWIYE

SEQ ID NO: 52421 - protein, 257 aa, Nocardia farcinica IFM 10152
MTDASPFDLTGHVSVVTGGNSGIGLAYARGLARAGADVCVVGRNTERNEAAAAELRAFGHRVLPLTCDVAEEQQVVDTIARAASELGRIDSCFVNAGVPQGTTPFLETDLAEFRRVTSVNLDAAFATLREAAKVMVAQGEGGSLVATASLVAKQGAPRGQSYAASKAGIIAVMNSIAVELAKHGIRANSVLPGWVETPMTDGIFAWDRFRERVLPRMPVGRWGRPEDFESVAVYLAGPASAFHTGDSLLIDGGYSKF

SEQ ID NO: 52422 - protein, 249 aa, Carboxydothermus hydrogenoformans Z-2901
MGELTGKVGIVTGGSKGIGFATAKRIAEEGAKVVIANRNKEEGEKAALQLREKGLEVYSIPCDVGKVADIKKLVSEVYGRYGRIDILVNCAGVNVRKPIEEYTEEDWNYMVDINLKGTFFACIEAGKHMIAQKEGVIVNLASIQAEEVLPERGIYATTKGGVKQLTKALAVEWAKYNIRVNAVSPAFIKTEMVEKVLQDPYWGNLIINKTPMRRPGTPEEVAEAILFLVSPKASYITGINLLVDGGWTA

SEQ ID NO: 52423 - protein, 355 aa, Lycopersicon esculentum
MESTDSSTGTRHQPQLPPGFRFHPTDEELIVHYLKKRVAGAPIPVDIIGEIDLYKFDPWELPAKAIFGEQEWFFFSPRDRKYPNGARPNRAATSGYWKATGTDKPVFTSGGTQKVGVKKALVFYGGKPPKGVKTNWIMHEYRVVENKTNNKPLGCDNIVANKKGSLRLDDWVLCRIYKKNNTQRSIDDLHDMLGSIPQNVPNSILQGIKPSNYGTILLENESNMYDGIMNNTNDIINNNNRSIPQISSKRTMHGGLYWNNDEATTTTTTIDRNHSPNTKRFLVENNEDDGLNMNNISRITNHEQSSSIANFLSQFPQNPSIQQQQQQQEEVLGSLNDGVVFRQPYNQVTGMNWYS

SEQ ID NO: 52424 - protein, 452 aa, ASPERGILLUS NIDULANS FGSC A4
MDVIPSTTPGEAVRISAKRTAELFGPEYLMVTPSASNGSIGVSYRRKTEYEHVKELPPALAAKQAQAAAARSKRPKISSRSEGSGSGDKSGASTALVRRGGRASGAAGDDKPTSLIQRPSATRQQPPEWHAPWKLMRVISGHLGWVRSLAVEPNNEWFASGAGDRTIKIWNLATGALRLTLTGHISTVRGLAVSPRHPYLFSCGEDKMVKCWDLETNKVIRHYHGHLSGVYTLALHPRLDLLVTGGRDGVARVWDMRTRSNIHVLSGHTGTVADVQCQEADPQVITGSLDATVRLWDLAAGKTMGVLTHHKKGIRSLATHPREFTFASASTGSIKQWKCPGGEFMQNFEGHNAIINTLSVNEDNVLFSGGDNGSMSFWDWKTGYRYQTIDTTAQPGSLEAEAGIMTSTFDRTGLRLITGEADKTIKVWKQDDQATPETHPVTWAPTLGRQRY

SEQ ID NO: 52425 - protein, 431 aa, Burkholderia fungorum LB400
MVSRRHFIGGSGAALLGAALVSKAGAASLPEAPTMAASAMQVPRAPSIGRPYTPVATLNGWSLPWRMKNGWKEFHLTAEPVVREFAPGMRVNLWGYNGQAPGPTIEAVEGDKVRIFVTNRLPEHTTVHWHGMLLPCGMDGVGGLTQPHIPPGKTFVYEFRLEKPGTFMYHPHADEMVQMAMGMMGTFIVHPKDPGVMQVDRDFVFIMSAYDIDPGSFTPRVNEMTDFNMWTWNARVFPGIDSLPVRAGDRVRIRVGNLTMTNHPIHLHGYHFEVVGTDGGWIPPSARWPEVTADIAVGQMRVIEFTANRPGDWAFHCHKSHHTMNAMGHQVPNMIGVPQKDLAKRINRLVPDYMAMGSTGGSMGAMAMPLPDNTLPMMTGTGPFGALEMGGMFTVVKVREGLGRDDYRDPGWFAHPKGTVAYEYTGELPDS

SEQ ID NO: 52426 - protein, 208 aa, Hordeum vulgare subsp. vulgare
  misc_feature (207)..(207): Xaa can be any naturally occurring amino acid
  unsure (1)..(208): unsure at all Xaa locations
SSVNELGSKASAVQWQELLRNMMTEVEWRTSGYVPTLDEYIENAVVTFALGPIVLPALYFVGPKITESMVIDPEYSELFRLMSTCGRLLNDVQTYEREYKEGKLNSVSLLVLHSDGSMTIPEARMKLQKPIDTCRRDLLRLVLREDNVIPRPCKELFWNICKTCYFFYYEGDAFSCQEEKAAVDAVIHDPLQLPMNLLSTSIYHFAXR

SEQ ID NO: 52427 - protein, 138 aa, Salmonella enterica
TAGISGGHLNPAVTIALWLFACFPKQKVLPYIIAQFAGAFGGALLAYVLYSSLFTEFETAHHMVRGSVESLQLASIFSTYPAAALNVWQAALVEVVITSILMGMIMALTDDGNGIPKGPLAPLLIGILVAVIGASTGP

SEQ ID NO: 52428 - protein, 128 aa, Narcissus pseudonarcissus
  misc_feature (9)..(9): Xaa can be any naturally occurring amino acid
  misc_feature (13)..(13): Xaa can be any naturally occurring amino acid
  misc_feature (20)..(20): Xaa can be any naturally occurring amino acid
  misc_feature (51)..(51): Xaa can be any naturally occurring amino acid
  misc_feature (58)..(58): Xaa can be any naturally occurring amino acid
  misc_feature (63)..(63): Xaa can be any naturally occurring amino acid
  misc_feature (79)..(79): Xaa can be any naturally occurring amino acid
  misc_feature (102)..(102): Xaa can be any naturally occurring amino acid
  unsure (1)..(128): unsure at all Xaa locations
ASWTGGKGXRKQXATKAARXSAPATGGVKKPHRFRPGTVALREIRRYQKSXELLIRKXPFQRXVREIAQDFKTDLRFQXSAVAALQEAAESYLVGLFEDTNXCAIHAKRVTIMPKDIQLARRIRGERA

SEQ ID NO: 52429 - protein, 389 aa, Burkholderia fungorum LB400
MSEADNSTPNTGAFKPKKSVALSGVTAGNTALCTVGKTGNDLHYRGYDILDIASACEFEEIAYLLVHEKLPTQAELTAYKTKLKALRGLPANVKAALEWIPAAAHPMDVMRTGVSVLGTVLPEKDDHNLPGARDIADRLMASLGSMLLYWYHYSHNGKRIEVETDDDSIGGHFLHLLHGVEPSNAWVDAMHVSLNLYAEHEFNASTFTGRVIAGTGSDIYSALTGAIGALRGPKHGGANEVAFEIQSRYQTPDEAEADIRRRVENKEVVIGFGHPVYTISDPRNKVIKEVAKKLSKEAGNTRLFSIAERLESVMWDAKKMFPNLDWFSAVSYHMMGVPTAMFTPLFVIARTAGWSAHIIEQRIDNKIIRPSANYTGPDDLPFVPLAKRV

SEQ ID NO: 52430 - protein, 115 aa, Salmonella enterica
ISGGHLNPAVTIALWLFACFPKQKVLPYIIAQFAGAFGGALLAYVLYSSLFTEFETAHHMVRGSVESLQLASIFSTYPAAALNVWQAALVEVVITSILMGMIMALTDDGNGIPKG

SEQ ID NO: 52431 - protein, 238 aa, Panax ginseng
MRAIYIISVIIVSLSIFSWGGNARSDYPWAMFALRLQWPAGFCEVNNACDTKSLLNTFTIHGLYPYNAKGTPALYCDGTAFDVNSVSDFLAEMHLAWPSHETNTEDIQFWEHEWKKHGRCSEALLKQTDYFRTALAFRKAFDIVGLLNQEGIYPNNDLYRPKMIKEAIKKHLNAVPEIDFTKNENSEYVLTDINVCVNQQATRFVDCPTDDATDDYRLKFVRLPSKMKFADPRTNSII

SEQ ID NO: 52432 - protein, 526 aa, Burkholderia vietnamiensis G4
MRRPWMPARSTFVSFMSAIPNSDPPGSPANPPTLHRALKARHLTMIAIGGSIGTGLFVASGASISQAGPGGAMVAYMLIGLMVYFLMTSLGEMAAFMPVSGSFATYGAKYVDEGFGFALGWNYWYNWAVTIAVELVAAQLVMHYWFPDVPGVWWSAAFLAVMFLLNALTVRGFGEAEYWFALIKVVTVLAFIGVGLLMIFGILKGAPANGWGNLTIGDAPFAGGLPALMGVAMIAGFSFQGTELIGVAAGESEHPRTTIPRAVRQVFWRILLFYVLAIFVIGVLIPYTDPNLLKSDVTDIGVSPFTLVFRHAGLAFAAGVMNAVILTAVLSAGNSGMYASTRMLYNLATEGRAPKLFAKLSPGGVPRNALYATTAVGALCFFTSLYGDKTVYLWLLNTSGMTGFIAWLGIAISHYRFRKGYVTQGYSIDQLPYQSKWFPFGPLFAFVLCMVIALGQDYQAFLANRIDWAGVAATYVGIPLFVVVWLGYRLMNRSRFVRYEDMEIAPWIAANRGGAAPRVENRETAG

SEQ ID NO: 52433 - protein, 601 aa, Magnaporthe grisea 70-15
MSPLWKTAAAIAVAASGSLVNAVYINGSIITPCDSLIYCRGELLKEVELAHPFADSKTFVDMPTIKPVDEVIEAFNKLQKPLSNNTELQDFLRENFAQAGGELEEVPNSELETDPVFLDKLDDTVIREFVEKVIDIWPSLTRRYKGPSNCEACADSFIPVNRTFVVAGGRFREPYYWDSYWILEGLLRTGGAFTNISKNTVENFLDLVETIGFVPNGARIYYKNRSQPPLLSQMVRIYVEHTNDTSILGRAVPLLIKEHEFFINNRSIDVEASNGKTYRLQRYAVTNTQPRPESYREDYITASNRSYYSPSGIIYPESHQLNESEKAVLYSHLASGAESGWDYTSRWLSTPSDAVRDNYFPLRSLNTNNIVPVDLNSILYANEVAIAEFLNRTGNSTGASDWMDLAKQRSEAMYALMWNETLWSYFDYNMTSKTQNRFIPVDEDAVSIETNNAPAGQQVFFHVAQYYPFWTGAAPRSLKNNPLAVLRAYERIDAYLDIKRGAIPATNLKTGQQWDEPNVWPPLMHILMEGLTRVPATFGEDDVAWTEIQDLALRLGQRYLDSTFCTWYATGGSTSETPQLQGLNAEDKGIMFEKVSEFAGF

SEQ ID NO: 52434 - protein, 465 aa, Glycine max
MVKAEIEKKGCSTRRWLWLVMALVAVFVAMVMSSRTSPKALFGAIDRACPCARGTPKYSGMVEDCCCDYETVDRLNEEVLHPSLQELVKTPFFRYFKVKLWCDCPFWPDDGMCRLRDCSVCECPESEFPESFKKPDHRLSMTDLVCQEGKPQAAVDRTLDSKAFRGWTEIDNPWTNDDETDNDEMTYVNLQLNPERYTGYTGPSARRIWDAVYSENCPKYPSQELCHEEKILYKLISGLHSSISIHIASDYLLDEATNLWGQNLTLMYDRVLRYPDRVRNLYFTFLFVLRAVTKASDYLEQAEYDTGNPNEDLTTQSLIKQLLYNPKLQAACPIPFDEANLWKGQSGPELKQKIQQQFRNISAMMDCVGCEKCRLWGKLQVLGLGTALKILFSVDGQENSSHTLQLQRNEVIALTNLLNRLSESVKFIQEMGPTAERIMEGGHFSAHTRTLISSWKKIWSYVSKT

SEQ ID NO: 52435 - protein, 333 aa, Arabidopsis thaliana
MADVENLNSVPASEDTEYGFKRPEMYSTNIANSITSYARHVFVLYKTPEAWLSHVEEEGLPQRFATLLKDRKSDLLVQTKLNVCEGGGSDGDVLIFPDMIRYKGVKDTDVEGFFEDVLVNGKPWSSGIQEEISGTFVFVCTHASRDKRCGVCGPVILERFKQEIGSRGLSDQITLKRCSHVGQHKYAGNLIIFCPDSAGKITGNWYGYVTPDDVPELLDQHIAKGEIIQRIWRGQMGLPGGEAEKVHEQKVIPNGNGVVKEESKGFTGGCCQGSNGVSCCQDETPKPEPIKKEVRKCTIWFQPLDKEELYIGAAVVGAIATIAMAFTFFKRSG

SEQ ID NO: 52436 - protein, 275 aa, Bordetella pertussis Tohama I
MAQVPVLKLNDGNAMPQLGLGVWQVPNDQAAASVKAALAAGYRSIDTAAIYGNEAGVGEGLRAAGVARKDLFVTTKLWNDRHGYDEAQRAMDESLRKLGLAYVDLFLIHWPVAGSDKFVDAWRAMVAMKEDGRARSIGVSNFTIANLRRLVDETGVVPAVNQVELHPGFAQRELRAFHAEQGIATESWSPLGQGAVMHDATLAGIAARHGKSAAQVTLRWHLQNGLIVIPKSVTPARIQANIDVFDFELSADEMADIDALPEGPRLGPDPATFTG

SEQ ID NO: 52437 - protein, 348 aa, GIBBERELLA ZEAE PH-1
MNDLPTAIPRGSWVLVTGANCYTGSHVVIELLNRGFHVRGTVRNLEYSKWLLEHPSVRSFADEEKVELVLADTSKPGDFDEAVKGVSAVIHLGNIGEQTPDPNVAFPSAIEAALTVCRSAAKEPNIKRFVLASGFWSAVWPRPGDSSTINQETWNEGLVHMAKLPPPYELTRMLVTYLAARVDAEKAVWKFVQDEKLPWVVNSVSPCWTLGDPLHARHYGPMPTQLLQQLYLGKIEALKENTTVYYTHVSDVAVIYAAAVIDPDVKGTRIQALAKPFNWNNALAIMRDAYPEEDFEEDFIPGDPTLSYKIENDIAPGLLQKWAGRDWITLEKGITETIDFSRKIGNLD

SEQ ID NO: 52438 - protein, 208 aa, Mesorhizobium loti MAFF303099
MTRPILYGADYSVYVRIARMALEEKGVDYELVPLDIFAADGIPAWYLEHHPFGRIPAFEHDGFRLFETNAITRYVDEAFDGPALQPADARGRARMGQMTGMLDAYGYRAMVWDVAVERLEKVEPDWALIASGLAQAETVLKVLRSLKAQGPWLLGDQLTLADLHAAPIIAYFVKVTQGRDLLARFADMRDWYARVADRASFARSEKAD

SEQ ID NO: 52439 - protein, 762 aa, Bacillus anthracis str. A2012
  misc_feature (201)..(201): Xaa can be any naturally occurring amino acid
  unsure (1)..(762): unsure at all Xaa locations
MAIQTSNLGYPRIGLQREWKKTLEAFWSNKINEEQFLTTMKEIRLQHVKVQQEKGIELIPIGDFTYYDHVLDTAYMLGFIPSRFSEFTSYLDVYFAMARGSKDHVASEMTKWFNTNYHYIVPEYEEGLQISLKDNRPLRLYEEAKQELGVDGKPVILGPYTFLKLAKGYTQEQFATILKQLVAPYVQLLSELHAAGAQIIXVDEPIFASLTKEEVQQAKEIYEAIRKEVPNATLLLQTYFDSVEENYEEIITFPVSSIGLDFVHGKEGNLNAISKYGFPADKTLAVGCIDGRNIWRADLDEVLTLFTTLQKQVQTKDLIVQPSCSLLHTPIDKTEETHLSTELFDALAFANQKLEELVLIHSALTQGTESISNELETYRNVHHTIRSSAARNREDVKAARTALKEEDFSRPLPFEKRYELQQVALKLPLLPTTTIGSFPQTTEVRQTRKEWRNGIISNEQYEQFIEKETEKWIRYQEEIGLDVLVHGEFERTDMVEYFGERLAGFSFTKNGWVQSYGSRCVKPPVIYGDVAFINGMTIKETVYAQSLTEKVVKGMLTGPVTILNWSFVRNDIPRKEVSYQIALALRHEIELLESSGIRVIQVDEPALREGMPLKEKDWDAYITWAVQSFLLATSSVANETQIHTHMCYSNFEDIVDAIRALDADVISIETSRSHGEFIDTLKHTTYEKGIGLGVYDIHSPRVPSKDEMYKIVEQSLQVCDPKYFWINPDCGLKTRRTEEVIPALEHMVQAAKDARSLLKTNA

SEQ ID NO: 52440 - protein, 428 aa, Leuconostoc mesenteroides subsp. mesenteroides ATCC 8293
MMTPKHNRIMDHGLAGIQHVFVSNVWLDPIYVAAAAGLSLNLSTNLVNTIFIVSGLVTLTQATKLAKLPIVQGPSAAFDALMINAGKAGQLATASGSILLSALIVFLLSVTGLINKLIKLLTPAITGTLIFLVGISLSGFTLSEFLGGYPGDKGFSSPTTLILSVTTATIVILLSIFGKGFWKRFSFLIALIVGDILAVSLGVVDYSVLSTKSWFGMPHLLPYGSLKFNWVMFLTFFVAYVVAVVEALGVYQAAGDTLKENISPRRIQNGLIGESAGSMFSSLFGGFPTTAFAQNVGILNLTGNVSRIPVIIAGILFVVLGFVPKIGAFLAITPSPVIGGIFLPAATTLILTGFNILKRAPDNNENNMIIGLSIILAIALPNYATGWSGVTGELLSNSILVGALSAIILQFALVNLPRMIKNIRGSHD

SEQ ID NO: 52441 - protein, 175 aa, Triticum aestivum
  misc_feature (24)..(24): Xaa can be any naturally occurring amino acid
  unsure (1)..(175): unsure at all Xaa locations
MAPAVMASSATTVAPFQGLKSTAXGLPVSRRSSGSLGRVSNGGRIRCMQVWPIEGIKKFETLSYLPPLSTEALLKQVDYLIRSKWVPCLEFSKVGFVFREHNSSPGYYDGRYWTMWKLPMFGCTDATQVLNEVEEVKKEYPDAYVRVIGFDNLRQVQCVSFIAFRPPGCEESGKA

SEQ ID NO: 52442 - protein, 376 aa, Oryza sativa
MLTDRWGGRREAMEFGNGGSSSSERRAAAEGATLARQGSVYSLTFDEFQSALAGGGGGGGGGSGFGKDFGSMNMDELLRSIWTAEESQAMASASGSAAGVGVAVGAPPTSLQRQGSLTLPRTLSAKTVDEVWRNLVRDEPPPVGAADGGDMPPQRQSTLGEMTLEEFLVRAGVVRENPPAAPPPVPPPMPPRPVPVVPKTTAFLGNFPGANDAGAAALGFAPLGMGDPALGNGLMPRAVPVGLPGAAVAMQTAVNQFDSGDKGNSDLSSPTEPMPYSFEGLVRGRRNGGGVEKVVERRQRRMIKNRESAARSRARKQAYTLELEAEVQKLKEMNKELERKQADIMEMQKNEVEEMIKDPFGRRKRLCLRRTLTGPW

SEQ ID NO: 52443 - protein, 115 aa, Musa acuminata
PGREDKTLPREEGRLPDATKGSDHLRDVFGHMGLSDQDIVALSGGHTVGRCHKERSGFEGAWTSNPLIFDNSYFKELLSSEKDDLIQLPSDKALLTDPVFRPLVEKYAADVNACS

SEQ ID NO: 52444 - protein, 188 aa, Medicago sativa
AWHSAGTFDSKTKTGGPFGTIKHQAELAHGANNGLDIAVRLLEPLKEQFPIISYADFYQLAGVVAVEITGGPEVPFHPGREDKPEPPPEGRLPDATKGSDHLRDVFGKAMGLSDQDIVALSGGHTIGAAHKERSGFEGPWTSNPLIFDNSYFKELLGGEKEGLLQLPSDKALLSDPVFRPLVEKYAAG

SEQ ID NO: 52445 - protein, 118 aa, Brassica napus
MAAARRLRTLQSQAENKVCVDCSQKNPQWAFVSYGIFMCLECSGKHRGLGVHISFVRSVTMDSWSEIQIKKMESGGNERLNKFLALYGISKETDIVAKYNSNAATVYRDRIQALAEGR

SEQ ID NO: 52446 - protein, 219 aa, Prunus armeniaca
MEKTECSEAENFGSVTTSLEPQATAKRKKAKSKNQRRFSDEQIRLLESIFEADSKLEPRRKVQVARELGLQPRQVAIWFQNRRARWKSKQIEQDFRTLRADYDNLASRFESLKEEKQSLLMQMQKLNELVGKPSQGLEGNIMVDGSRLQEELEPRGVIQSHKNNTSNDVGCHGDEIHELLSMAHVDASSLSPQDWHRFEPSILFDPSRFTSSHWLNFWT

SEQ ID NO: 52447 - protein, 541 aa, Treponema denticola ATCC 35405
MEWWNKRVFYQIYPRSFCDANNDGMGDIQGIISKLPYLKELGIGAIWLSPVTASSDYDNGYDVSDYCDINPKFGTMDDFKSLLKEADKLDIKIVMDLVINHTSDQHRWFIESKNPESPYHNYYVWKEPRLVKGKKLPPNNWDSLFLGSAWKYCEENGLYYLHLFTENQPDLNYNNPAVTEEVKKILKFWLDMGVAGFRCDVINCIYKTSYEDAKKRRIKTGKEFYLSQKGCHDILKELNRDVLKPYNAFTVGETMDVSLEEAKDFIQDELTLVFPFEHHTGVDCWFQIPVLKRKYKPFRMIKILKKWQTKMPWTPLFFENHDQARSVSRFGDEGKYYKESVKMLATVLLTQKGTPFIYQGQEIGLTNTDFKSMDEIDDIATKNIYDTLRRLKFGKKRAFKMTMNYARDHARTPIPWDDSENGGFCTVKPWLRLNEKYKEINVKKNLSESDSCFNYYKKLIALRNEEEVLQLGDIEFADLGKDIFAYYRKKGDKTFFIVSNMSGKAQKIREEVRGLPILFNYRNFNPQQKILRPFESVITRI

SEQ ID NO: 52448 - protein, 345 aa, Emericella nidulans
MKYMSLDQRGSVMAEYIWIDAHGGTRSKTKTLSKAPSSVDELPEWNFDGSSTAQAPGDNSDVYLRPVAMYPDPFRRGDNILVLCETWDSDGSPNKFNYRHDCARLMETHAKEEFWFGLEQEYTLLGPDGWPYGWPKGGFPGAQGPYYCGVGTGKVYCRDIVEAHYRACLYAGVKISGINAEVMPSQWEYQVGPCHGIEMGDHLWISRFLLHRVAEEFGVKISNDPKPIKGDWNGAGLHTNVSTTSTRAEGGIKAIESYMKKLEARHVEHIAVYGEGNEERLTGRHETGNIDKFSYGVADRGGSIRIPRQVAKDGKGYFEDRRPASNADPYQITGIIAETVSFSNR

SEQ ID NO: 52449 - protein, 79 aa, Allium sativum
MSCCGGNCGCGSSCKCGNGCGGCKMYGDVGEERSSMTTTSILGVAPQRSFEEFENEMIAEGGNACKCGSNCTCNPCTCK

SEQ ID NO: 52450 - protein, 754 aa, Arabidopsis thaliana
MRKNANLLILFMIFMFFFCGLMFLFFSVLGTEIVSGLVTNVASILWKWLWSLQTSTTTTTTTKSGVSSRSMVKYESGYNMETVFDGSKLGIEPYAIEVSPNGGELIVLDSENSNIHKISMPLSRYGKPKLLSGSQEGYTGHVDGKLKEARMNRPRGLAMDDRGNIYVADTINMAIRKISDDGVSTIAAGGRWSGGSKEESMRFSDDFDLIYVSSSCSLLVIDRGNQLIKEIQLHDHDCSQPEPDTDSLHLGTALLVAAVFFGYMLALLVRRVRSLFSSSSHDTKSKRHVATPSMTMAPYQRYPRPVRQPLIPPQHESEKEEGFLGSLGKLVVKTGSSVSEMMSGSRNVIPPNFHQYHHQQEPNQWPVQESFAIPEEDGPPALEPRSGTNPDKPYLRAQGTNQNRSYYQDYDQYQNQQKRNVNDTASFEDNREKNEIVFGAVQEQDGRREAMVIKAVDFNEAINDQRNLRPRINYMGYSSQVPGLTAYCTDLTSYTMRSDHLIFNKSTGSISVHISKTDGQYEREIEDEEEEGDFLQEKEKIRVRVAEKQRGRRIRRIQIQALYSSLSLSLNLYDLSQNQSHCFMGLESFPISEMDATDEMHEAMFAKRGCCFILPCLGSSQPSGPNGSVWWQRIRTVDKLEPDERWWVSGWMKMREWSEIVAGPKWKTFIRRFGRNHCCNGGIDGGCNRPEHVSFRYDSWSYSLNFDDGKQTGHFEDEFPYRDYSMRFAAPSLPVSTKCSIDFDNDNHAPSLFK

SEQ ID NO: 52451 - protein, 381 aa, Bacillus cereus ATCC 10987
MASNLEQLTDQLISIRRNLHENPELSYEEFETTKAIKNWLEEKNITIINSNLETGVIAEISGNSNGPLIAIRADIDALPIQEETNLSYASKIHGKMHACGHDFHTAAIIGAAYLLKEREPSLNGTVRFIFQPAEESSNGACKVIEAGHLHGVQAIFGMHNKPDLPVGTIGIKDGPLMAGVDRFEIEIHGVGTHAAVPDAGVDPIVASSQIVMALQTIVSRNISSSHNAVVSVTNIHSGNTWNVIPEKAILEGTVRTFQAETREKIPALMERIIKGVSDALGVKTEFHFHSGPPAVHNDEILTHLCTQTAQEMSLDVITPTPSMAGEDFSFYQQHIPGSFVFMGTSGTHEWHHPSFTIDEHALPISAKFFALLAEKALKQLT

SEQ ID NO: 52452 - protein, 489 aa, Lotus corniculatus var. japonicus
MIAIPYLTALTTYFSYGLLFAFGQFRDFFRKIFDWCSSNNLQGYAPICLGLEDFYIRRLYLRIQDCFGRPIASAPDAWFDVVERYSNDNNKTLKRTDKLSRCLNLGSYNYLGFAASDEYCTPRVIDSLKKYSPSTCSARVDGGTTDLHNELEECVASFVRKPAALVFGMGYVTNSAILPVLMGKGSLIISDSLNHNSIVNGARGSGATIRVFQHNMPSHLEEVLREQIAEGQPRTHRPWKKIMVIVEGIYSMEGELCKLPEIIAICKKYKAYTYLDEAHSIGAVGKTGRGVCELLGVDTADIDIMMGTFTKSFGSCGGYIAGSQELIQYLKYTCPAHLYATSVSPPAAQQIISSIKVILGEDGSNRGAQKLAKIRENSNFFRSELQKMGFEVLGDNDSPVMPIMLYNPAKIPAFSRECLRQNVAVVTVAFPATPLLLARARICISASHSREDLVTALQVISRVGDLVGIKYFPAEPSKQQQEGKTVKYD

SEQ ID NO: 52453 - protein, 504 aa, Oryza sativa
MARGKNHPDGEEEEAPAAAGEEEAPVEMDEEGEMEEEEEEEQGEGEGEERDEGEEEEEWEDAEEVEGGEESEQAAAEEEDSPLVVVEAEAAAPVVDGSPPKLAEGYYEIEDIRRRRLRKGKLQYLVKWGSQWEGGAWDLAAPELSGRIRTEDWKDQEEITYCLPKQVRVDVDHVVKVPRLRMAVDTHIAIFGTIHLYEFSYEDQEQDCVQKKQQYGRRGWPESANTWEPLENLSACSDIIDAFEMRLQSPRPGRKRKRKITTTPVAGSNPSHGKRGRPRLDAKSHTRAPAPEPKQLPCRTSSRRATNCSSKTVAGLDASGSVVRNQLAQNIVQEGSSSVISRTPCQELPLSIRLTDQQNEHHLVNGSSNSENLVKVPPSQGGQVTGAKKRKSGNVRRFEQNKPTQGQGECGALVVAEDVGSTEGETGDKKKTEGCPNRVHITKIIKPVRFAAAVNNDVQQVSITFKALRSDGQEVMVDDKELKANNPLLLISYYEQCLRYNPTS

SEQ ID NO: 52454 - protein, 347 aa, Streptococcus agalactiae 2603V/R
MFVKKGLFVFLLLCILSMWLMIFGVAFYYFGSLHQSLTSRIIYQFVLTVLLTTTAWFMGAYFLAFEGHFKTVFQFQEADGKQIVNCLFQLCFALYAVVMLIGSIIDRVQTKRLLLAVVSWLFLVYTPLAYLIWNSEGVFAKMGVLDFSGGMIVHLSAGLSSYILAHVIGKSEHQHNKVKNDSLFLGMILITFGWFGFNMGPVGEWNSQAIMILLNTIFAIIGGGLAWTLAAKWNGEEEKTGSLLNGIIVGLVTSTAGVGYLLTWQLLAVTFFASLFTYFVTDYVAKAFAIDDVVSSFGMNGIGGLLGSLGVGLFKLSHMPVQLLALATTILLSIIMTYIISKAIFRK

SEQ ID NO: 52455 - protein, 440 aa, Triticum aestivum
MTMMAMPEAPCLCARPSLAARARRPGSGPAPRLRRWRPNATAGKGVGEVCAAVVEAATKVEDEGEEDEPVAEDRYALGGACRVLAGMPAPLGATALAGGVNFAVYSGGATAAALCLFTPEDLKADRVTEEVPLDPLMNRTGNVWHVFIEGELHNMLYGYRFDGTFAPHCGHYLDVSNVVVDPYAKAVISRGEYGVPARGNNCWPQMAGMIPLPYSTFDWEGDLPLRYPQKDLVIYEMHLRGFTKHDSSNVEHPGTFIGAVSKLDYLKELGVNCIELMPCHEFNELEYSTSSSKMNFWGYSTINFFSPMTRYTSGGIKNCGRDAINEFKTFVREAHKRGIEVILDVVFNHTAEGNENGPILSFRGVDNTTYYMLAPKGEFYNYSGCGNTFNCNHPVVRQFIVDCLRYWVTEMHVDGFRFDLASIMTRGSSLWDPVNVYGAP

SEQ ID NO: 52456 - protein, 275 aa, Brassica napus
MGGGFRVLHLVRPFLAFLPEVQSADRKVPFREKVIYTVISLFIFLVCSQLPLYGILAPPGPDPFYWMRVILASNRGTVMELGITPIVTSGLVMQLLAGSKIIEVDNNVREDRALLNGAQKLLGILIAIGEAVAYVLSGMYGPVGQLGVGNAILIILQLFFAGIIVICLDELLQKGYGLGSGISLFIATNICESIIWKAFSPTTINTGRGAEFEGAVIALFHMLITKSNKVAALRQAFYRQNLPNVTNLLATVLIFLIVIYFQGFRVVLPVRSKNA

SEQ ID NO: 52457 - protein, 629 aa, Desulfovibrio desulfuricans G20
MCGIAGYCGACGVADTTEKECAGRLEALLAGIVHRGPDDAGITCAHNVAIGMRRLSIIDLAGGHQPMLSGDGRYALVFNGEIYNFRELRSELAEAGYSFATNSDSEVLLKGYMAWGRGVLDRLDGMFAFAVHDRHAGTVFLARDHLGIKPLYYIHLGGVFAFCSEPAPLLELPQVRRRLDHDALAAFLSFKYVPAPDTFIKDIKKLAAGHTLEYSPRGDMLRTERYWQLQGREGSSDAGELAERLTRAVDSQMVSDVPLGVFLSGGIDSGLLTWAAAGQGGEHFTGGYTVAFDETGRKKGLRAGGSFDESRLAALSAAHLGVPLSSTTLASPAQATLDDWIRRFQEPFANTSIPANFLLCQWVARHVKVALNGSGADELFGGYDRYYAVHPPAALRALHCAAPLLRRVADMLPVGGGKNSLVHRARRYLAGCALAPAQKHAGSIRLFTDTQLAAIAPGVVPATFVQDAFAGAPQGSLLYKATWTDMQTMLPDDYLTLVDRTSMAASLEVRVPFLARDFVQYAFSLPPAAKIAGWKKKTALRALAAKHLPEDIARQPKMGFESPVGRWFRDGLGEALCRQLAQSPLQNIISVRGVQALAQSHSAGQVDAAKPLLALYTLVRWMDMYRVEL

SEQ ID NO: 52458 - protein, 453 aa, Rubrobacter xylanophilus DSM 9941
MIEVVNPATEEVLKRLEPASSSEVDAAVDRAKRAFPGWRDVPPAERARLLGRLAEALDAEREDLARTESLNVGKPLSAARAEMKMVVDTFAYYAGAPERLLGETIPVAGGVDMTFREPLGVVGLIVPWNFPLQITSWKVAPALAAGNTVVLKPAELTPLTALKLERIAGEAGIPEGVLNVVVGPGEIVGKRLVEHPEVAKIAFTGSTEVGRKIMAGAAGTVKRVTLELGGKSASIVFADADLEKAAAAAPLAVFDNAGQDCCARSRILVERGAFERFMSLLEPAVKELRVGDPQDETTQMGPLISASHREKVASYVTEEAPVAIRGEAPDGKGFWYPPTVLAPVSNKDRVAREEIFGPVAAVIPFEDEEEAVRLANDTIYGLSGSVWTRDVARALRVARRVETGTLSINSNTSVRVSTPFGGFKQSGVGRELGPHALEHYTEVKNVFVATEEG

SEQ ID NO: 52459 - protein, 753 aa, Ashbya gossypii ATCC 10895
MSQEGSAKRADFKYKIGKIKHTPPVLKDVRSGLEFIELEKRDDEKVYGVTKFLGNYKEEKKLGQGTFGEVYRGVHLATQRQVAMKKILVKTENDLFPITAQREITILKRLNHRNVVQLIEMVYDYPPAQNGAAYGQDSSQASASADTMKSFYMILPYMVADLSGILHNPRVTLEMADIKNMMLQILEGINYIHCKKFMHRDIKTANILLDHKGILKIADFGLARNYYGAPPNLKYPGGAGTDAKYTSVVVTRWYRAPELVLGDKNYTTAVDIWGIGCVFAEFFEKRPILQGKTDIDQGHVIFKLMGTPSDSDWQLARYLPGAELTRTSYEPTYKERFGKYLTEKGLDLLSTLLSLDPYKRLTAMAAMQHPFFSEDPLPKLQLTLPCEESHETDIARYGQEMQKTVSNLPPAAPSGHAVEQSQTQQQSSRHHQSQPYQSLPPQKSSQPHPQQIPEAAPVQQPSQQPPQEPSAHQQQYSSRGPQQHRTTPAPTSLPPKPKPAPPGARYNREAPPQNKPVKPLTRHLGAQYQHNNYGNYYNHWQGGERYYETYNDGYPHADRYSDDTHYNGYGYRSRGYQRYDMRREGESRYNQRPYAPQQGAAYRPNRRDTYKLVDRTGQPYPPERVPNPELHPSPAPRPKRTLTNTTQLSSHSSAATGSTAASGSAVSNSSEPVRRSSTASLDNSESGNILQQKPPPPVANPLEARIYGRDEVQSNHPGGRLYPRSTPDSKNSEGAAPSEASTDPTKRNIVDYY

SEQ ID NO: 52460 - protein, 210 aa, Zea mays
  misc_feature (14)..(14): Xaa can be any naturally occurring amino acid
  misc_feature (68)..(68): Xaa can be any naturally occurring amino acid
  misc_feature (170)..(170): Xaa can be any naturally occurring amino acid
  unsure (1)..(210): unsure at all Xaa locations
MVSLKLQKRLAASXVLKCGKGKVWLDPNEVSEISMANSRQNIRKLVKDGFIIRKPQKVHSRSRARRAXHEAKQKGRHSGYGKRRGTREARLPTKILWMRRMRVLRRLLRKYREAKKIDKHMYHDMYMKVKGNMFKNKRVLMESIHKSKAEKAREKTLSDQFEAKRAKSKXASRERKIARREERLAQGPREPTAPVAAPAPSTGAPKKAKK

SEQ ID NO: 52461 - protein, 416 aa, Candida albicans SC5314
MAPFAGIKELPPDPLFGLKARYNADSRTNKVDLGIGAYRDNNGKPWILPAVRQAEQKLINSPDYNHEYLSISGFAPFTESAAKVILGENSLAIKDKKIVSQQSLSGTGALHLAGVFIKEFYQGNHTIYLSQPTWANHKQIFEYIGFKVASYPYWNNDTKSLDLSGFLKAISSAPDGSVFLLHACAHNPTGLDPNQSQWDEILAALEKKKHFIIFDSAYQGFASGDLEKDAYPIRKAIDSKVITSPIIICQSFAKNVGMYGERVGAIHVIPSTVESNDSLNRAIKSQLNRIIRSELSNPPAYGSKIVATILNDPELYSQWRKDLVTMSSRIGEMRNTLRSKLESLGTPGTWNHITEQTGMFSFTGLTPQMVERLEKHHGIYLVSSGRASVAGLNEHNVDQVAKAIDEVVRHFGKSKL

SEQ ID NO: 52462 - protein, 238 aa, Brassica napus
  misc_feature (52)..(52): Xaa can be any naturally occurring amino acid
  misc_feature (110)..(110): Xaa can be any naturally occurring amino acid
  misc_feature (129)..(129): Xaa can be any naturally occurring amino acid
  misc_feature (189)..(189): Xaa can be any naturally occurring amino acid
  misc_feature (231)..(232): Xaa can be any naturally occurring amino acid
  unsure (1)..(238): unsure at all Xaa locations
WFRSIGEFYVKVPFLGAVSYLTLAICPFCMGSAASPAGARLFPCPCRGQDRXGFALPFSVLHSGWLPHLTARRGPTQCALLCAIFSGFVSKWWFRESVMIVVARGDKSGXRDGIPMLLKIPRMFDPWGXGYSIIGFGDIILPGLLVTFALRYDWLANKKLKSGYSLGAMSAYGLGLLITYIALNLMDGXHGQPALLYIVPFILGTLIVLGHKRGDLETLWTTGEPERPCPXXRLQPQS

SEQ ID NO: 52463 - protein, 412 aa, Zea mays
MLRDRKLPESTSTTFLSLSHSSCATVHPSPIRGAAMVAEQATTTVAVGEPPTATPQPAAAAAAGQRSVPTPFLTKTYQLVDDPAVDDVISWNDDGSAFIVWRPAEFARDLLPKYFKHNNFSSFVRQLNTYGFRKIVPDRWEFANDCFRRGQKRLLCDIHRRKVTLPVAAATRAVTVVATIPMALPVDSPVYSGEEQVLSYSSSPEPPSLLQQQPTPSASGSGDMGEENERLRRENAWLARELGQMKKLCNNILLLMSKYAATKQPDYAKGGGPGNCSGGEFWGAAAAPPLPSILELLPSCRRDSASAAVDAAAAAAGTEHEVDEKAGARLFGVSIGRKRMRDESSGHGGGGEDPVGRSAEVKAEPVDARLDHQHSATEPQSWPIYRPRPVYHPLRACSGLVSAGSDHDWSNN

SEQ ID NO: 52464 - protein, 367 aa, Prunus persica
MGKGGMSSQGGALEAHVEQENMAAWLVGVNTLRIQPFKLPTVGPNDVRVKIKAVGICGSDVHYLKTMKCADFVVQEPMVIGHECAGIVDEVGSLVKNLVPGDRVALEPGISCWRCEQCKGGRYNLCPDMKFFATPPVHGSLANQIVHPADLCFKLPENVSLEEGAMCEPLSVGVHACRRANIGPETNVLVIGAGPIGLVSVLSARAFGAARIVIVDVDDERLSIAKSLGADDAVKVSTNPQDLEDEVSKISKAMKGGVDVSFDCVGFNKTMSTALSATRPGGKVCLVGMGHGVMTVPLTPAAAREVDVVGIFRYKNTWPLCLEFLRTGKIDVKPLITHRFGFSQKEIEEAFETSARGGNAIKVMFNL

SEQ ID NO: 52465 - protein, 230 aa, Streptococcus pneumoniae TIGR4
MVKLVFARHGESEWNKANLFTGWADVDLSEKGTQQAIDAGKLIKEAGIEFDQAYTSVLKRAIKTTNLALEASDQLWVPVEKSWRLNERHYGGLTGKNKAEAAEQFGDEQVHIWRRSYDVLPPNMDRDDEHSAHTDRRYASLDDSVIPDAENLKVTLERALPFWEDKIAPALKDGKNVFVGAHGNSIRALVKHIKGLSDDEIMDVEIPNFPPLVFEFDEKLNVVSEYYLGK

SEQ ID NO: 52466 - protein, 373 aa, Methanosarcina barkeri str. fusaro
MEFRTFETPIALIRILQNIQQPIFCYIVQNLHWYPEVKVLSRMNQYTVLMNEYSHSSRIKPIKVLTFGEALFDIIRGSAHLGGAPLNLAAHLAKLGAKPAVITAVGRDELGKSLLSRAKAMGIDTSYILIDKKRPTGTVTVQLQAEGIPVFTINKGVAWDAITPDEKEFKALSGEEWDVFCFGTLAQRTEENRKTLERLFSEIKAKHFFYDVNLRTGNYKKEWILSSLEHTTILKLNEKEASTISCLLSGTSGTCKPLTSYKAFCRLVTEKYPEIFVICISRGPKGAAVCYKGVYEEVETTPIEVADTVGAGDAFSAGFLYTCLSGYGVSKAASIACILGTYVASKPGAVPDYSKELMEELKAQGLNLSFIKT

SEQ ID NO: 52467 - protein, 221 aa, Oryza sativa (japonica cultivar-group)
MAAVGAHAAVYHHPVSGLSAPAGDAAYSMSSYFSHGGSSTSSSASSFSAALAAATTPPLPDPSGSQFDISEFFFDDAPPAAVFNGAPTAALPDGAAANATRSAAEAVPAPAPAAVERPRTERIAFRTKSEIEILDDGYKWRKYGKKSVKNSPNPRNYYRCSTEGCNVKKRVERDKDDPSYVVTTYEGTHNHVSPSTVYYASQDAASGRFFVAGTQPPGSLN

SEQ ID NO: 52468 - protein, 164 aa, Salmonella enterica
SGASLGLWEICIIWGLGISLAVYLTAGISGGHLNPAVTIALWLFACFPKQKVLPYIIAQFAGAFGGALLAYVLYSSLFTEFETAHHMVRGSVESLQLASIFSTYPAAALNVWQAALVEVVITSILMGMIMALTDDGNGIPKGPLAPLLIGILVAVIGASTGPLT

SEQ ID NO: 52469 - protein, 322 aa, Streptococcus pneumoniae TIGR4
MTPADFPALENGFSQATRNSSQDALNVVAAKLPTFLGGSADLAHSNMTYIKTDGLQDDANRLNRNIQFGVREFAMGTILNGMALHGGLRVYGGTFFVFSDYVKAAVRLSALQGLPVTYVFTHDSIAVGEDGPTHEPVEHLAGLRAMPNLNVFRPADARETQAAWYLAVTSEKTPTALVLTRQNLTVEDGTDFDKVAKGAYVVYENAADFDTILIATGSEVNLAVSAAKELASQGEKIRVVSMPSTDVFDKQDAAYKEEILPNAVRRRVAVEMGASQNWYKYVGLDGAVLGIDTFGASAPAPKVLAEYGFTVENLVKVVRNLK

SEQ ID NO: 52470 - protein, 514 aa, Arabidopsis thaliana
MDTATTTCSAVDLSALLSSSSNSTSSLAAATFLCSQISNISNKLSDTTYAVDNTYLLFSAYLVFAMQLGFAMLCAGSVRAKNTMNIMLTNVLDAAAGAISYYLFGFAFAFGTPSNGFIGRHHSFFALSSYPERPGSDFSFFLYQWAFAIAAAGITSGSIAERTQFVAYLIYSTFLTGFVYPTVSHWFWSSDGWASASRSDNNLLFGSGAIDFAGSGVVHMVGGIAGLCGALVEGPRIGRFDRSGRSVALRGHSASLVVLGTFLLWFGWYGFNPGSFLTILKGYDKSRPYYGQWSAVGRTAVTTTLSGCTAALTTLFSKRLLAGHWNVIDVCNGLLGGFAAITSGCAVVEPWAAIVCGFVASWVLIGFNLLAKKLKYDDPLEAAQLHGGCGAWGLIFTGLFARKEYVNEIYSGDRPYGLFMGGGGKLLAAQIVQIIVIVGWVTVTMGPLFYGLHKMNLLRISAEDEMAGMDMTRHGGFAYAYNDEDDVSTKPWGHFAGRVEPTSRSSTPTPTLTV

SEQ ID NO: 52471 - protein, 211 aa, Geobacter metallireducens GS-15
MITTLLEGNRRFVAETFEKEKELFVELTRGQKPTVLWIGCSDSRVPVNTITQTKAGEVFVHRNVGNIVAANDWNLSAVLEFSINHLKIPDIVICGHYGCGGIQALDEENSDDKYIPIWLINAYKAKERVDEKLRALHIDIPHEQRMKLIVEENVRLQLEHLREYPFVRRAVEEGKLTLNGWVYDMGNGEIRIVATESAPRIGKGTCSIKIK

SEQ ID NO: 52472 - protein, 309 aa, Streptococcus pneumoniae TIGR4
MSNLSVNAIRFLGIDAINKANSGHPGVVMGAAPMAYSLFTKQLHINPAQPNWINRDRFILSAGHGSMLLYALLHLSGFEDVSMDEIKSFRQWGSKTPGHPEFGHTAGIDATTGPLGQGISTATGFAQAERFLAAKYNREGYNIFDHYTYVICGDGDLMEGVSSEAASYAGLQKLDKLVVLYDSNDINLDGETKDSFTESVRDRYNAYGWHTALVENGTDLEAIHAAIETAKASGKPSLIEVKTVIGYGSPNKQGTNAVHGALLEQMKLHQLVKPSVGTTNHLKFQNKYMLISKNMLQTVAHQLIKLGLN

SEQ ID NO: 52473 - protein, 407 aa, Sporothrix schenckii
MSFSSMLSRLHGQPDSYDKKSKYHFGRMLGAGTYGIVREADGPTGKVAIKVILKKNVKGNEQMVYDELNLLQNLKHSHIVRFVDWFESRDKYYIVTELATGGELFDRICEQGKFTEKDASQTIKQVLSAVDYLHKNNVVHRDLKPENLLYLTKQSDSDLVLADFGIAKMLDSKDEVLTTMAGSFGYAAPEVMLKKGHGKPVDMWSMGVITYTLLCGYSPFRSENLPDLIEECTSARVIFHERYWKDVSEDAKDFIIGLLQPNPDDRWSSGDALKHKWLSGESATEHNLLPEIKAYMAKARLRRGIELVKLTNRIEALKMQEDDPENSDMQTDTAAPLQKAAAAAAAQDDGASGSVGAESGPTDKTKQTIQKVKGAIFREVVMAKVREMRQQEEVRKEVEEASKQGSP

SEQ ID NO: 52474 - protein, 545 aa, Vibrio vulnificus CMCP6
MTTNYIFVTGGVVSSLGKGIAAASLAAILEARGLKVTMMKLDPYINVDPGTMSPTQHGEVFVTEDGAETDLDLGHYERFIRTKMTKRNNFTAGRVYSDVLAKERRGDYLGATIQVIPHITNDIKDRVINGSQGHDVAIVEVGGTVGDIESLPFMEAIRQLAVEIGRERAMFMHLTLVPYLAAAGEVKTKPTQHSVKELLSIGIQPDILVCRSDRMIPANERKKIALFCNVPEKAVISMKDVDSIYKIPQLIKSQGLDDLVCARFGINAPEADLSEWEQVIYEEANPTGEVTIGMVGKYIELPDAYKSVNEALKHAGLKNRLSVNIKYVDSQDVETKGVEVLQGLDAILVPGGFGDRGIEGKILAAKYARENKVPYLGICLGMQVALIEYARNVAGMEGAHSTEFNKDTKYPVVGLITEWVDSEGNVEERTESSNLGGTMRLGSQLCHLAKGTKARELYGSDTIHERHRHRYEVNNNLRPQIEKAGLKVSGLSADKKLVEMIENPNHPWFVAAQFHPEFTSTPRDGHPLFSGFIKAAGENARGELK

SEQ ID NO: 52475 - protein, 288 aa, Arabidopsis thaliana
MEVPIINRIGDFDMGINSINDPSYLSRALAVSGVGKLHQAYSFWKWGALLLLAFFASFTSLTTRIKTLVFRLRNVNVSLPSQTLLCNYDSDSDWSFSSDSSDEEKDEDDNKEDDSVNGDSRVQRFGYYHDDDDKGISGSVPWLRRCSGSFGDLLDLGSSGVVKLWDNLDFNGEGSPVASFFSKCGSYSLLSSAVLLAAEKKGSDGLEVSAWDARVGFGVPALLAEWKQPGRLLGKIIRVDVGDVDKIYVGDDVEGEITVGDMRMVNGALTELTESEVERMVRRRRRRH

SEQ ID NO: 52476 - protein, 667 aa, Oryza sativa
MEMQHVVEVEQGRAAADGRPSVGPAYRSAFARGGFPPPVAGLDCCYDIFRMAVEKFPDNRMLGHREIVDGKAGAYVWKTYKEVFDLSTKIGNSIRSRGLAKGSRCGIYGANCPEWIITMEACNAHGIYCVPLYDTLGAGAVEFILCHAEVEIAFTEEKKIEQIFKTFPKSAEFLKTIVSFGKVTQEQKENASKYGLEIYSWDEFLSLADQEFDLPVKAKTDICTIMYTSGTTGDPKGVLISNASIICLVAGVDRLLNCVNEQLEQTDVYMSYLPLAHIFDRVVEELFMFHGASIGFWRGDVKLLVEDIGTLKPTILCAVPRVLDRIFSGLQAKIASGGFIKSTLFNLAYKLIEYDLGIIFCSKQFRMMKGAKHNEAAAICDKVVFSKVKEGLGGNVRVILSGAAPLATHVEEYLRVVTCAHVLQGYGLTETCAGSFVSLPNQMCMIGTVGPPVPNIDVCLESVPEMNYDALATRPRGEICIRGETVFSGYYKREDLTKDVLIDGWFHTGDIGEWQPDGSMKIIDRKKNIFKLSQGEYVAVENLENIYGLVSAIDSIWVYGNSFESFLVAVVNPNKEALESWAAANGISGDLEALCENPKAKEYILGELSKVGKEKKLKGFEFIKAVHLEPVPFDMDRDLITPTYKKKRPQLLKYYQGTIDNMYRSAK

SEQ ID NO: 52477 - protein, 413 aa, Triticum aestivum
MSVSSSSMCGGDAGMKCVVWFRRDLRVEDNPALAAAARTAGEVVPAYVWSPEEDGPYFPGRVSRWWLSQSLKHLEASLHRLGAAKLVTRRSPDSVAALLQLVRDTGATHLFFNHLYDPISLVRDHRLKEMMTAEGIVVQSFNADLLYDPWEVNDDKGQPFNMFMPFWNRCLSMPYDPPAPLLPPKRINSGDLSMCPSDDLIFEDESERGSNALLARAWSPGWQNADKALSAFLNGPLIDYSVNRKKADSANTSLLSPYLHFGELSVRKVFHLVRMKQLVWSNEGNHAAEESCTLFLRSVGLREYSRYLCFNHPCSHEKPLLAHLRFFPWVVDESTFKFWRQGRTGYPLVDAGMRELWATGWLHDRIRVVVSSFFVKVLQLPWRWGMKYFWDTLLDADLESDALGWQYLGRDHA

SEQ ID NO: 52478 - protein, 775 aa, Triticum aestivum
  misc_feature (479)..(479): Xaa can be any naturally occurring amino acid
  misc_feature (521)..(521): Xaa can be any naturally occurring amino acid
  misc_feature (525)..(525): Xaa can be any naturally occurring amino acid
  misc_feature (534)..(534): Xaa can be any naturally occurring amino acid
  unsure (1)..(775): unsure at all Xaa locations
MVVAAAILPELATQLVVPVAAAVGIAFAVLQWVLVSKVKVAPEPRGEGGSAGGGAGAGGKDGASEYLIEEEEGLNDHNVVLKCAEIQTAISEGATSFLFTEYKYAGGFMTVFAVLIFVFLGSIEGFSTKSQPCHYSVGKTCKPALANAAFSTIAFVLGAVTSLVSGFLGMKIATYANARTTLEARKGVGKAFIVAFRSGAVMGFLLAASGLFVLYVAINLFGLYYGDDWEGLFEAITGYGLGGSSMALFGRVGGGIYTKAADVGADLVGKVERNIPEDDPRNPAVIADNVGDNVGDIAGMGSDLFGSYAESSCAALVVASISSFGINREFTPMMYPLLISSVGIIACLITTLFATDFFEVKEVDQIEPALKKQLIISTAVMTVGIALVSWLGLPYTFTIFNFGAQKTVHSWQLFLCVAVGLWAGLVIGFITEYYTSNAYSPVQDVADSCRTGAATNVIFGLALGYKSVIIPIFAIAFSXFLSFSLAAMYGVAVAALGMLSTIATGLAIDAYGPISDNAGGXAEMXGMSHRIREXTDALDAAGNTTAAIGKGFAIGSAALVSLALFGAFVSRAGITTVDVLTPNVFIGLLVGAMLPYWFSAMTMKSVGSAALKMVEEVRRQFNTIPGLMEGTAKPDYATCVKISTDASIKEMIPPGALVMLTPLIVGTFFGVETLSGVLAGALVSGVQIAISASNTGGAWDNAKKYIEAGASEHAKSLGPKGSDCHKAAVIGDTIGDPLKDTSGPSLNILIKLMAVESLVFAPFFATYGGILFKYL

SEQ ID NO: 52479 - protein, 157 aa, Glycine max
MAFPDPSMSVSPQRKMGRGKIEIKRIENTTNRQVTFCKRRNGLLKKAYELSVLCDAEVALIVFSSRGRLYEYANNSVKATIERYKKASSDSSGAGSASEANAQFYQQEADKLRQQISNLQNNNRQMMGDSLGSLTAKDLKNLETKLEKGISRDSVQK

SEQ ID NO: 52480 - protein, 217 aa, Saccharomyces cerevisiae
MSKITSSQVREHVKELLKYSNETKKRNFLETVELQVGLKNYDPQRDKRFSGSLKLPNCPRPNMSICIFGDAFDVDRAKSCGVDAMSVDDLKKLNKNKKLIKKLSKKYNAFIASEVLIKQVPRLLGPQLSKAGKFPTPVSHNDDLYGKVTDVRSTIKFQLKKVLCLAVAVGNVEMEEDVLVNQILMSVNFFVSLLKKNWQNVGSLVVKSSMGPAFRLY

SEQ ID NO: 52481 - protein, 667 aa, Escherichia coli O157:H7 EDL933
  misc_feature (114)..(114): Xaa can be any naturally occurring amino acid
  unsure (1)..(667): unsure at all Xaa locations
MSRKDLANAIRALSMDAVQKANSGHPGAPMGMADIAEVLWNDFLKHNPTDPTWYDRDRFILSNGHASMLLYSLLHLTGYDLPLEELKNFRQLHSKTPGHPEIGYTPGVETTTGXLGQGLANAVGLAIAERTLAAQFNQPDHEIVDHFTYVFMGDGCLMEGISHEVCSLAGTLGLGKLIGFYDHNGISIDGETEGWFTDDTAKRFEAYHWHVIHEIDGHDPQAVKEAILEAQSVKDKPSLIICRTVIGFGSPNKAGKEEAHGAPLGEEEVALARQKLGWHHPPFEIPKDIYHAWDAREKGEKAQQSWNEKFAAYKKAHPQLAEEFTRRMSGGLPKDWEKTTQKYINELQANPAKIATRKASQNTLNAYGPMLPELLGGSADLAPSNLTIWKGSVSLKEDPAGNYIHYGVREFGMTAIANGIAHHGGFVPYTATFLMFVEYARNAARMAALMKARQIMVYTHDSIGLGEDGPTHQAVEQLASLRLTPNFSTWRPCDQVEAAVGWKLAVERHNGPTALILSRQNLAQVERTPDQVKEIARGGYVLKDSGGKPDIILIATGSEMEITLQAAEKLAGEGRNVRVVSLPSTDIFDAQDEEYRESVLPSNVAARVAVEAGIADYWYKYVGLKGAIVGMTGYGESAPADKLFPFFGFTAENIVAKAHKVLGVKGA

SEQ ID NO: 52482 - protein, 244 aa, Bifidobacterium longum NCC2705
MDYPLFTKLAAEFFGTAILMIFGNGSVANVELKNTKGHHAGWLNIAMGYGFGVMFPVLMFGSVSGAHINPAMTIAQAVNGLFPWSDVLPYIVAQLLGALLGQLIVYITYYPHYKETEDAEAILGTFCTTDADNQKVNYFLNEMFGTLVLVFGALCCLSLAWGKQDYAAASIVVGFIVWGLVTSMGGPTGPGLNPARDLMPRLLHAILPIPHKGSSRWGEAWIPVVAPIVGAIIGAWLFVFFFAS

SEQ ID NO: 52483 - protein, 472 aa, Spinacia oleracea
MLVLSSSAPPVLEVCKDRVSSSFSTSSSSSSSAFSAVVFRRSFFTRFNSSLICCCSSKLKLMADTALPSSSSSTSASASYSAAAKSVEEENHEIPVKKEDDNQLLRSRTYRNVRSAEELISEIKRESEIGRLPKSVAYAMEGLFHYYRNAVLSSGISHADEIVLSNMSVMLDFVLLDIEDPFVFPPFHKAIREPADYYSFGQDYIRPLVDFGNSYVGNIAIFQEMEEKLKQGDNIILMSNHQSEADPAVIALLLEKTNSLIAENLIYIAGDRVITDPLCKPFSMGRNLLCVYSKKHMYDDPELVDVKKRANTRSLKELVLLLRGGSKIIWIAPSGGRDRPDAVTGEWYPGTFDFAALDNMRRLVEHAGRPGHIYPLALLCYDIMPPPAQVEKEIGEKRVMSFHGVGVSVEPEINYNDVSLGCKNDEEAKSVYGQALYNSVNEQYNVLKAAIHGKQGSGASTPTTSLSQPWAS

SEQ ID NO: 52484 - protein, 518 aa, Zea mays; identical to SEQ ID NO: 1245

SEQ ID NO: 52485 - protein, 172 aa, Triticum aestivum
SQYYVLIRLGRSGFKKIMSNLTATADHLADRLKATGRFEIMSEGQGRGLPLVAFRLKDEHHYNEFDISSKLREGGWIVPAYTMAPNVEHIKMLRVVVREDFSRSRCEILVKDIIAALRALDTSDKEAVAKRREHIEEHSHSSIYSNDVNPKSKTTGTESESTEDSKTAQGIC

SEQ ID NO: 52486 - protein, 694 aa, Burkholderia fungorum LB400
MQNDPALDQLCINTIRTLSMDAVQKANSGHPGTPMALAPVAYHLWQNHLRYDPDEPLWPDRDRFVLSVGHASMLLYSLLHLANVKAVDDDGNPTDGPAVSLDDIEHFRQMGSKTPGHPEYRMTTGVETTTGPLGQGLGNSVGMAMAARWYESHFNKPDAPLFDYRVYALCGDGDMMEGISHEAASLAGHLKLSNLIWIYDSNRVTIEGHTDLAYSDDVETRFRGYNWHTLHVSDANDAAALEAAFVEAKSITDRPTLIVVHSIIGWGAPHKQDTSAAHGEPLGVEEVALAKKAYGWPEDKFFYVPDGVHERFAAGIGARGKAAREEWQAKYDAYSRKYPELAREFAQIEAHELPAGWDSDIPTFDADPKGVASRESSGKVLNAIAARVPWMIGGAADLSPSTKTNLKFEGAGSFEYDNYGGCNLHFGIREHAMGAAVNGLALSNLRPFGSTFLIFSDYMKPPIRLSAIMEVPAIYVFTHDSIGVGEDGPTHQPIEQLASLRGVPGLTVLRPGDANEVAEAWRVALADPRRPSCIVVSRQPLPTLDRSRYAAAKGTQKGAYVLADAADGQKPQVILIATGSELSVCVDVYEKLTSEGIAARVVSMPSWDIFERQDEAYQDSVLPPDVDARVAVEQAASLGWDRYVGRLGAQVVMHTFGASAPLAELKKKFGFTPEHVYEAAKQQIARVQGKRSQE

SEQ ID NO: 52487 - protein, 147 aa, Leuconostoc mesenteroides subsp. mesenteroides ATCC 8293
MTKYNDEELRARLTPEEYEVTQHAATERPFTGKYDQWWEDGIFVDVVSGEPLFSSTDKYDSGCGWPSFTKGIDDDEHLQENTDRSLGMTRTEITSKEAASHLGHVFNDGLPDRGGLRYCINSASLRFIPKKDLEKDGYGKYLKLFKD

SEQ ID NO: 52488 - protein, 536 aa, Arabidopsis thaliana
MTSISDKFILVNGGNCLGFGCFSEPYTFLVREYFNHVLAKFPFEFGISQQDNFSMLQSNSAGGEDNPDFKWGAKRGVGRKDNKVRFYESFTLEGIEYRLFDCAYFYVHGQSETSIGKLVTFTRHQQRFLGEYEPQWDELFLACGDEKGVSNINDVETIMGKCNVVCTSDDRRNPRPGTKELRRAKYIFSRTFDTRLRIISEDFADAIAGIGVDKLFNMRRDKQPVKRLNSSAAAITRASPVKSFRPDLGSTKLVTFLEDRADHVHVKRNPPVNTETTTRGQIPILKTRAFGELYASGSSVNAKPSKKRKLILNTPETDDSDDQGPQSGEKKLIKNPPLVEKAPSQNIEKKSWYKKLPFEDELKPAIEKGRVLLIENLEPSYTSLEVEFLFRQAFKEGVDAKMIPSSPMSSPHSGRALVIFGTTKAADSAMSRLNEDCLMLSGQRALTGSKNVPVEIGRCRSFTGHFNMVDRSLMTAQKVSCCITLRLFSVVISLVMVTHRKPNSPCQITEYYKLTPLFSLIIVNRPHKFVNFQPHP

SEQ ID NO: 52489 - protein, 68 aa, Oryza sativa
MARRRRRTHMRSAVYALRPGHHALEEILDCIGPCVDGWHSTGGSHSLTRRDLLLEIADLAHKPDIFVS

SEQ ID NO: 52490 - protein, 133 aa, Brassica napus
MASLLARQAAQALRARQTAQLGPAASAMQGHLRTYMNAGIPKRFKEDEEKEQLAKDVAKDWNAVFERSINTLFLTEMVRGLMLTLKYFFDRNVTINYPFEKGPLSPRFRGEHALRRYESGEERCIACKLCEAI

SEQ ID NO: 52491 - protein, 213 aa, Methanosarcina acetivorans C2A
MVEKTILEAVKKVVEESPKRNFSESVDLAINLKNLDMNQPKNRVDEEVILPHGLGKELKIGVFAKGDVGLKAKAAGAAYVISDVELEELAADKNRARVLANECDLFIAETQFMPIIGKNLGIVLGPRGKMPIPLMPNKDVGELIQSKQNAVKLRSKDRLTFHVAVGRRDMNPEDLAENIETIMSRLERVLDKGKHNLRTVYVTTTMGKSERVV

SEQ ID NO: 52492 - protein, 169 aa, Salmonella enterica
GASLGLWEICIIWGLGISLAVYLTAGISGGHLNPAVTIALWLFACFPKQKVLPYIIAQFAGAFGGALLAYVLYSSLFTEFETAHHMVRGSVESLQLASIFSTYPAAALNVWQAALVEVVITSILMGMIMALTDDGNGIPKGPLAPLLIGILVAVIGASTGPLTGFAWNP

SEQ ID NO: 52493 - protein, 149 aa, Oryza sativa (japonica cultivar-group)
MADQLTDDQIAEFKEAFSLFDKDGDGCITTKELGTVMRSLGQNPTEAELQDMINEVDADGNGTIDFPEFLNLMARKMKDTDSEEELKEAFRVFDKDQNGFISAAELRHVMTNLGEKLTDEEVEEMIREADVDGDGQINYDEFVKVMMAK

SEQ ID NO: 52494 - protein, 298 aa, Oryza sativa
AFFFCASLCALSISLSSKTLTLAAGGSGGGGGRGGGGVVVVVGGMDGGGAHRTPEDVFRDFRARRAGMIKALTTDVEKFYQQCDPEKENLCLYGLPNETWEVNLPAEEVPPELPEPALGINFARDGMDEKDWLSLVAVHSDTWLLAVAFYFGARFGFDKESRKRLFSMINNLPTIYEVVTGTAKKQSKEKTPKTSGKSNKSGTKPSRQPEPNSRGPKMPPPKVEDDSGGEEEEEEEDHENTLCGACGDNYGQDEFWICCDACETWFHGKCVKITPAKAEHIKHYKCPNCSSSSKRARA

SEQ ID NO: 52495 - protein, 398 aa, Salmonella enterica subsp. enterica serovar Typhi Ty2
MRGDFYKQLTNDLETARAEGLFKEERIITSAQQADITVADGSHVINFCANNYLGLANHPELINAAKAGMDSHGFGMASVRFICGTQDSHKALEQKLASFLGMEDAILYSSCFDANGGLFETLLGAEDAIISDALNHASIIDGVRLCKAKRYRYANNDMVELEARLKEAREAGARHVLIATDGVFSMDGVIANLKGVCDLADKYDALVMVDDSHAVGFVGENGRGSHEYCDVMGRVDIITGTLGKALGGASGGYTAARKEVVEWLRQRSRPYLFSNSLAPAIVAASIKVLEMVEAGAELRDRLWANARQFREQMSAAGFTLAGADHAIIPVMLGDAVVAQKFARELQKEGIYVTGFFYPVVPKGQARIRTQMSAAHTPEQITRAVDAFTRIGKQLGVIA

SEQ ID NO: 52496 - protein, 158 aa, Salmonella enterica
GASLGLWEICIIWGLGISLAVYLTAGISGGHLNPAVTIALWLFACFPKQKVLPYIIAQFAGAFGGALLAYVLYSSLFTEFETAHHMVRGSVESLQLASIFSTYPAAALNVWQAALVEVVITSILMGMIMALTDDGNGIPKGPLAPLLIGILVAVIGAS

SEQ ID NO: 52497 - protein, 341 aa, Salmonella enterica subsp. enterica serovar Typhi Ty2
MKALSKLKAEEGIWMTDVPEPEVGHNDLLIKIRKTAICGTDVHIYNWDEWSQKTIPVPMVVGHEYVGEVVGIGQEVKGFKIGDRVSGEGHITCGHCRNCRGGRTHLCRNTTGVGVNRPGCFAEYLVIPAFNAFKIPDNISDDLASIFDPFGNAVHTALSFDLVGEDVLVSGAGPIGVMAAAVAKHVGARHVVITDVNEYRLELARKMGVTRAVNVAKESLNDVMAELGMTEGFDVGLEMSGAPPAFRTMLDTMNHGGRIAMLGIPPSDMSIDWTKVIFKGLFIKGIYGREMFETWYKMAALIQSGLDLSPIITHRFSVDDFQKGFDAMCSGQSGKVILSWD

SEQ ID NO: 52498 - protein, 330 aa, Vibrio vulnificus CMCP6
MSISNTVTKVKDFDVNQMDDDFNDDIEINEKEDLTEEKVKLREEFDASNKSLDATQLYLGEIGFSPLLTAEEEVLYARRALRGDEAARKRMIESNLRLVVKISRRYSNRGLALLDLIEEGNLGLIRAVEKFDPERGFRFSTYATWWIRQTIERALMNQTRTIRLPIHVVKELNIYLRTARELSQKLDHEPTAEEIAAQLDIPVDDVSKMLRLNERISSVDTPIGGDGEKALLDIIPDANNSDPEVSTQDEDMRVSLIHWLEELNPKQKEVLARRFGLLGYEPSTLEEVGQEIGLTRERVRQIQVEGLRRLREVLIKQGLNMENLFDIDMD

SEQ ID NO: 52499 - protein, 528 aa, Arabidopsis thaliana
MVIGAAARVAIGGCRKLISSHTSLLLVSSQCRQMSMDAQSVSEKLRSSGLLRTQGLIGGKWLDSYDNKTIKVNNPATGEIIADVACMGTKETNDAIASSYEAFTSWSRLTAGERSKVLRRWYDLLIAHKEELGQLITLEQGKPLKEAIGEVAYGASFIEYYAEEAKRVYGDIIPPNLSDRRLLVLKQPVGVVGAITPWNFPLAMITRKVGPALASGCTVVVKPSELTPLTALAAAELALQAGVPPGALNVVMGNAPEIGDALLTSPQVRKITFTGSTAVGKKLMAAAAPTVKKVSLELGGNAPSIVFDDADLDVAVKGTLAAKFRNSGQTCVCANRVLVQDGIYDKFAEAFSEAVQKLEVGDGFRDGTTQGPLINDAAVQKVETFVQDAVSKGAKIIIGGKRHSLGMTFYEPTVIRDVSDNMIMSKEEIFGPVAPLIRFKTEEDAIRIANDTIAGLAAYIFTNSVQRSWRVFEALEYGLVGVNEGLISTEVAPFGGVKQSGLGREGSKYGMDEYLEIKYVCLGDMNRH

SEQ ID NO: 52500 - protein, 292 aa, Zea mays
MAAGLPPGYRFYPTEEELICFYLRNKLDNLRDDIERVIPVVDVYSVDPCQLPGIHELLCDGGAGAGEEEPGVYFCPRQEREARGGRPSRTTPSGYWKAAGTPGAVYSADRRAIGVKKTMVFYYGRAPSGTKTKWKMNEYRAFQFETPGPGLGLAAAGVAADGSSSSSAHHAADGPAPPPNVGPQLRGEFSLCRLYTKSGSLRQFDRRPLAATGGVVVPGEDPAGPFTAVAASPPDDDDGSGSSMQQQQQQLTGGGANNDPYGDGVVTEREDAHDPFGDDVAMLDALLYWPGD

SEQ ID NO: 52501 - protein, 666 aa, Bacillus cereus ATCC 10987
MSHSIEQLSINTIRTLSIDAIEKANSGHPGMPMGAAPMAYTLWTQFMKHNPNNPTWFNRDRFVLSAGHGSMLLYSLLHLSGYDVTMDDLKNFRQWGSKTPGHPEYGHTPGVDATTGPLGQGISTAVGMAMAERHLAAKYNRDAYNVVDHYTYAICGDGDLMEGVSAEASSLAAHLQLGRLVVLYDSNDISLDGDLNRSFSESVEDRYKAYGWQVIRVEDGNDIEAIAKAIEEAKADEKRPTLIEVRTTIGFGSPNKSGKSASHGSPLGVEETKLTKEAYAWTAEQDFHVAEEVYDNFRKTVQDVGETAQAEWNTMLGEYAQAYPELANEFQAAMNGQLPEGWEQNLPTYELGSKAATRNSSGAVINAIAESVPSFFGGSADLAGSNKTYMNNEKDFTRDDYSGKNIWYGVREFAMGAAMNGIALHGGLKTYGGTFFVFSDYLRPAIRLAALMQLPVTYVFTHDSIAVGEDGPTHEPIEQLAALRAMPNVSVIRPADGNESVAAWRLALESTNKPTALVLTRQDLPTLEGAKDDTYEKVAKGAYVVSASKKETADVILLATGSEVSLAVEAQKALAVDGVDASVVSMPSMDRFEAQTAEYKESVLPKAVTKRFAIEMGATFGWHRYVGLEGDVLGIDTFGASAPGEKIMEEYGFTVENVVRKVKEML

SEQ ID NO: 52502 - protein, 200 aa, Nicotiana tabacum
MATEAPIEATEVPPASATETVAKQPHKLERRWTFWFDNQSKPKQGAAWGSSLRKAYTFETVEEFWSLYDQIFKPSKLTANADFHLFKAGIEPKWEDPECASGGKWTVTSSRKANLETMWLETLMALVGEQFDESEEICGVVASVRRSQDKLSLWTKTASNEAIQMSIGRKWKEIIDAEKISYSFHDDSKRERSAKSRYTV

SEQ ID NO: 52503 - protein, 259 aa, Geobacter metallireducens GS-15
MTRTVKAGAVQFTIKVGDVDVNMRYVEGALRRLAAQGCALAVLPEMWDTGYAYRELNELAKRTPEVVTELGRLSRELGMVIVGSMPEPHGEKVCNTAYVLDRGELVGSYRKIHLFSLMGEDRSLDGGDRWLVVDTSVGRIGVFICYDLRFPELTRRLAVEGAEILVVPAEWPKPRDEHWKALLKARAIENQLFVVAANCCGIQGKLDFFGSSLIIGPKGEHLAEGGYEPCEISATLDFGEMQSWRRQIPCFEDRKPEYY

SEQ ID NO: 52504 - protein, 657 aa, GIBBERELLA ZEAE PH-1
MWIADACKAFVFSFVAVFHSPGHPDEGPHQDVLKFTHNSPGDKIPYPRFPAPNGPDKDGVEFQCKYPELKGWEKCTSADDRSCWLKGPYHQVFDINTDYENFWPEGVVREYTLNVTNQDINGDGVNNPYGKVFNNQYPGPWIQACWGDIIKVTVHNTLAYNGTTIHWHGLRQLESFEMDGVNGVTQCPIAPGDSFTYTFRAVQYGTSWYHSHYSLQYADGLAGPITIYGPSSANWDEGRDPILITDWSHRSAFQSWQRELVPNSPTRPMMNGVLINGVGNFAGSFPRERFNMTVTKGKKYILRVINTSVDTTWIFSIDNHNFTVMSTDFVPIHPYDVDHVVIGIGQRYHIVLDATPTNTSVLPASPDGNYWIRTVGADGCKAFEAGNEPDERQGILRYNASSTFVPTTFRTPYVTACRDENYTMLKPIFPWKVKPVELDYEKAQFDIGLKKYKDRPEKGDGFQWWAFGENPLWLNFSNPTILNLNNDTWDPNYAVDLVVPDSKKDEWVYIAITAPPTPLVNKPDRVFAPVAHPLHLHGHDFALLAQGTNFTDLDTGKVKLKWDNPPRRDVALIPAGGYLVVAFKADNPGSWLFHCHIAWHASSGLAIQILEQQERLKWMMNNDRMKEVERVCARWNDWYGNKTNHWNAEVFQDDSGI

SEQ ID NO: 52505 - protein, 220 aa, Xanthomonas campestris pv. campestris str. ATCC 33913
MNELNHLLENNRAWADRINREDPEFFAKLSTQQSPEYLWIGCSDSRVPANQIIDMAPGEVFVHRNIANVVVHTDLNCLSVIQFAVDVLKVKHILVVGHYGCGGVFASLTQKRMGLVDNWIRHVTDVADKHEACLHQAGDLSVQHARLCELNVLEQVVNVCRTTIVRDAWDRGQDLRVHGWVYSLRDGRAHDLRMSVDRADILQERYDAALAQIQADHSER

SEQ ID NO: 52506 - protein, 175 aa, Triticum aestivum
MAPTVMASSATSVVPFQGLKSTVGLPVSRRSNGASLGSVSNGGRIRCLQVWPIEGIKKFETLSYLPPISREALLKQVDYLIRSKWVPCLEYSKVGFIFREHNASPGYYDGRYWTMWKLPMFGCTDATQVINEVEEVTKEYPDAYVRIIGFDNMRQVQCVSFIAFKPPGCEESGKA

SEQ ID NO: 52507 - protein, 330 aa, Arabidopsis thaliana
MADTSSRTDVSTDGDTDHRDLGSDRGHMHAAASDSSDRSKDKLDQKTLRRLAQNREAARKSRLRKKAYVQQLENSRLKLTQLEQELQRARQQGVFISSSGDQAHSTGGNGALAFDAEHSRWLEEKNRQMNELRSALNAHAGDTELRIIVDGVMAHYEELFRIKSNAAKNDVFHLLSGMWKTPAERCFLWLGGFRSSELLKLLANQLEPMTERQVMGINSLQQTSQQAEDALSQGMESLQQSLADTLSSGTLGSSSSDNVASYMGQMAMAMGQLGTLEGFIRQADNLRLQTLQQMLRVLTTRQSARALLAIHDYSSRLRALSSLWLARPRE

SEQ ID NO: 52508 - protein, 517 aa, Oryza sativa (japonica cultivar-group)
MAVRRRRRRSRAAAVLVAALLLAASAATASAASSYPAKVVTGLLSSTASAVVKQLWSLKSTATRTGSAAAGRSMVKYEGGYAVETVFDGSKLGIEPHDVEVTPSGELLVLDSMNSNVYRVQLPLSRYSRPKLVAGSPEGLSGHVDGRLREAKMNHPKGFTVDDRGNIYVADAMNMAIRKISDTGVTTIAGGKSMRGGHLDGPSDDAKFSTDFEIRYISSSCSLLVIDRGNQAIREIALHNDDCEYQYEAGFPLGIALLFAAGFFGYMLALLQRQVLGMVSTADEPQTPPRPSIASIPPYQKPLKPSLRPPLIPTEDQAGKHEAEEGFFTSIGKLIGGAKSSAVEIFSRKKRPTHQYHHHLQQQRANPWPVQESYAIPHDETPPPLDMRAATPRKNYAFMTKEPEKVHHVRHGRPYFNGWDMQHAPQQQPEQQMYHQQHLQQHRQYSAGPQTFYEQSCETTNEIVFGAVQEVDTKRRMVEIKAVNYGDTFYEQYGMRYRNNYIGYNNSSNGNNNSYYY

SEQ ID NO: 52509 - protein, 523 aa, GIBBERELLA ZEAE PH-1
MSNVHDYVPSATEKAEKETPTPDNASYHVVHQTGTVHELGNIVDPVLSAKTLLVNEAINEIGWTNFHLKLSCLAGFGYAADSLVVFLQSVAASQAYLEIGDGGYPTGYAMALYAGLLVGALFWGFGADVIGRKIAFNVTLFIAAIATIAAGAGPNWIGFCVLVAILGFGAGGNLVLDPTVMLEFVPARQQWVITAMAAWWGIGQASAGFIAWGFYSRPEWSCTSETESCTWQSNKAWRLIMFTGGALMFLMSALRILIIQLPETPKFLVASGKEEELVAMLQKLASKYRRPCSLTVEALRACGTTNASEQSGRPDSFKGLGKSLFGHIRGLFSNKKLAISTILIWFSWTLIGLGYPLFFLYLPSRLPDYVPSFTQTWRDYTITNICAIFGPLIAAGLTEVKFLGRRYTMVVGAIVTAIFFFCYTIIKTPAQNLAISSCISVCINLYYGTLYAYTVEVFPSAHRSTGNGVAVALNRIMGLLSAVISVTADTTTVTPLYISAGLFIVLAIISVILPFEPYGHNAS

SEQ ID NO: 52510 - protein, 132 aa, Brassica napus
MDMTSSSGKRSVAKKMTTPCCTKMGMKRGPWTVEEDKILVSFIEKEGEGRWRSLPKRAGLLRCGKSCRLRWMNYLRPSAKRGGIAPDEEDLILRLHRLIGNKWSLIAGRIPGKTDNEIKNYWNTHPRKKLLS

SEQ ID NO: 52511 - protein, 273 aa, Leuconostoc mesenteroides subsp. mesenteroides ATCC 8293
MKTLTEDILYRVIKKRAKDSHKGTYGRVLIIGGTAQFGGAVIMNALAAVNSGAGLVTVATDPSNFTALHSHLPEAMVVDFNEDLTEYIKKSDVVLIGSGLGDRIDLVQHTFYAILPRQILIVDGSALTLVAEHKLKWPKSRLVLTPHQMEWQRLSGVTINEQAFEAFNMLAQQRMNVEPILVLKQHHTQIYTNDCAFEIPVGGPYQATGGMGDTLAGMIAGFTAQFMLSFSEAILAAVYAHSAIADELAETRYITLPTEISASIPEFMHRYSR

SEQ ID NO: 52512 - protein, 304 aa, Arabidopsis thaliana
MQIFVKTLTGKTITLEVESSDTIDNVKAKIQDKEGIPPDQQRLIFAGKQLEDGRTLADYNIQKESTLHLVLRLRGGMQIFVKTLTGKTITLEVESSDTIDNVKAKIQDKEGIPPDQQRLIFAGKQLEDGRTLADYNIQRESTLHLVLRLRGGMQIFVKTLTGKTITLEVESSDTIDNVKAKIQDKEGIPPDQQRLIFAGKQLEDGRTLADYNIQKESTLHLVLRLRGGMQIFVKTLTGKTITLEVESSDTIDNVKAKIQDKEGIPPDQQRLIFAGKQLEDGRTLADYNIQKESTLHLVLRLRGG

SEQ ID NO: 52513 - protein, 456 aa, Arabidopsis thaliana
MQIFVKTLTGKTITLEVESSDTIDNVKAKIQDKEGIPPDQQRLIFAGKQLEDGRTLADYNIQKESTLHLVLRLRGGMQIFVKTLTGKTITLEVESSDTIDNVKAKIQDKEGIPPDQQRLIFAGKQLEDGRTLADYNIQKESTLHLVLRLRGGMQIFVKTLTGKTITLEVESSDTIDNVKAKIQDKEGIPPDQQRLIFAGKQLEDGRTLADYNIQKESTLHLVLRLRGGMQIFVKTLTGKTITLEVESSDTIDNVKAKIQDKEGIPPDQQRLIFAGKQLEDGRTLADYNIQKESTLHLVLRLRGGMQIFVKTLTGKTITLEVESSDTIDNVKAKIQDKEGIPPDQQRLIFAGKQLEDGRTLADYNIQKESTLHLVLRLRGGMQIFVKTLTGKTITLEVESSDTIDNVKAKIQDKEGIPPDQQRLIFAGKQLEDGRTLADYNIQKESTLHLVLRLRGG

SEQ ID NO: 52514 - protein, 653 aa, Oryza sativa
MPYNESERLDILKRYSNMLEALPGYAFDDATSLVSYICGVPIAYIAFIDENRQWFKSEIGLGFSIVPREITFSRYTIMDSSLVEIQDTLLNERFKDDPDVKGGLKIRFYAGMPLITPDGHAVGVLCAADHEPRSLNENQKRALHIVARHVITTLELGIKNNELLRQKKIAESAVLAKESFLANMSHEIRTPLNAIIGFTELLSGTPLDKQQQAFIQDVQTAGENLLLIVNDILDLSKIESGGLSLEKQPFNLKKSLRHVYDLLKVKTADGVEFNLYLDAELPDVITGDQGRLNQIMVNLAGNALKFTNEGEVTISVKNKGETEDSYTIRFSVKDTGIGIPKEHLESIFERFTQGQEDTTRKFGGTGLGLSIVKELVKLHDSKIQVKSREGAGSEFFFTTTYKKPANVKENPKLLPVNDLGRLKILLLEDNRLNQKLAQNVIEGFGFEIDIAENGDQGIKLLSENQYDLVLMDLQMPARDGYQTTHYIRSELKNEIPIIAMTAHSLADEHHRCLNAGMDGYVPKPFKQHELLEAIKQALKKDRRPLIPSKADLSAIEKTDRIKPGWKKEVTSQFIQKAPVELKELQQAVYRKDFRSVLQTAEQLQVWLHLFLLENLSQTLTSIEDQARKKEFTAETADNLDILHSNIEEIIKEL

SEQ ID NO: 52515 - protein, 373 aa, Arabidopsis thaliana
MGYLLEETLSSNSKTPIVIDDDNELGLMAVRLANAAAFPMVLKAALELGVFDTLYAEASRSDSFLSPSEIASKLPTTPRNPEAPVLLDRMLRLLASYSVVKCGKVSEGKGERVYRAEPICRFFLKDNIQDIGSLASQVIVNFDSVFLNTWAQLKDVVLEGGDAFGRAHGGMKLFDYMGTDERFSKLFNQTGFTIAVVKKALEVYQGFKGVNVLVDVGGGVGNTLGVVTSKYPNIKGINFDLTCALAQAPSYPGVEHVAGDMFVDVPTGDAMILKRILHDWTDEDCVKILKNCWKSLPENGKVVVIELVTPDEAENGDINANIAFDMDMLMFTQCSGGKERSRAEFEALAAASGFTHCKFVCQAYHCWIIEFCK

SEQ ID NO: 52516 - protein, 380 aa, Arabidopsis thaliana
MQIFVKTLTGKTITLEVESSDTIDNVKAKIQDKEGIPPDQQRLIFAGKQLEDGRTLADYNIQKESTLHLVLRLRGGMQIFVKTLTGKTITLEVESSDTIDNVKAKIQDKEGIPPDQQWLIFAGKQLEDGRTLADYNIQKESTLHLVLRLRGGMQIFVKTLTGKTITLEVESSDTIDNVKAKIQDKEGIPPDQQRLIFAGKQLEDGRTLADYNIQKESTLHLVLRLRGGMQIFVKTLTGKTITLEVESSDTIDNVKAKIQDKEGIPPDQQRLIFAGKQLEDGRTLADYNIQKESTLHLVLRLRGGMQIFVKTLTGKTITLEVESSDTIDNVKAKIQDKEGIPPDQQRLIFAGKQLEDGRTLADYDIQKESTLHLVLRLRGG

SEQ ID NO: 52517 - protein, 533 aa, Lentinula edodes
MLPFVYLLAAELVCLVYGAEVIRDTTTYGQTVSENLFIVNKQLAPDGFQRSTVLAGLTPSTGSFPGPLISGNKGVRFNLNVTDQLTDPSMVRSTTVHWHGLFQKTTNYADGVAFVSQCPIAANHSFLYDFQVPDQAGTFWYHSHISVQYCDGLRGPLVIYDPQDPQAYLYDVDDGTTVLTIADWFHNTSTELIAAAVAPLADATLINGKGRYLGGPAVPLAVINVQQGKRYRFRMISIACDANHNFSIDGHRLTVIEVDGENHEPATVDNIQIFPGQRYSFVLDATQPVDNYWVRALSSSGVGTSGFIGGLNSGILRYQGAPDADPTTTNSTGVVLTESMLHPLENPGAPGLPFPGGADEVLNLTLGFNLPATFFMNDTQYIPPTVPVLLQILSGAQSPQDLLPPGSVYTLPINKTIEINFFGNATPGGPHPFHLHGHSFDVVRSADNTTYNYENPVRRDVTSVAIGNQTTIRFVTDNPGPWFLHCHIDLHLEFGLAVVMAEAPSLVKATDVTTPAWDELCPIYDSLTPAQLP

SEQ ID NO: 52518 - protein, 533 aa, Lentinula edodes
MLPFVYLLAAELVCLVYGAEVIRDTTTYGQTVSENLFIVNKQLAPDGFQRSTVLAGLTPSTGSFPGPLISGNKGVRFNLNVTDQLTDPSMVRSTTVHWHGLFQKTTNYADGVAFVSQCPIAANHSFLYDFQVPDQAGTFWYHSHISVQYCDGLRGPLVIYDPQDPQAYLYDVDDETTVLTIADWFHNTSTELIAAAVAPPADATLINGKGRYLGGPAVPLAVINVQQGKRYRFRMISIACDANHNFSIDGHRLTVIEVDGENHEPATVDNIQIFPGQRYSFVLNATQPVDNYWVRALSSSGVGFSGFTGGLNSGILRYQGAPDADPTTTNSTGVVLTESMLHPLENPGAPGLPFPGGADEVLNLTLGFNLPATFFMNDTQYIPPTVPVLLQILSGAQSPQDLLPPGSVYTLPINKTIEINFFGNATPGGPHPFHLHGHSFDVVRSADNTTYNYENPVRRDVTSVAIGNQTTIRFVTDNPGPWFLHCHIDLHLEFGLAVVMAEVPSLVKATDVTTPAWDELCPIYDSLTPAQLP

SEQ ID NO: 52519 - protein, 318 aa, Glycine max
MGKSKVLVVGGTGYVGRRIVKASLEQGHETYVLQRPEIGLDIEKVQMLLSFKKQGAHLVEASVSDHQSLVEAVKLVDVVICTMSGVHFRSHNLLVQLKLVEAIKAAGNVKRFLPSEFGMDPALMGHALEPGRVTFDEKMTVRKAIEDANIPFTYISANCFAGYFAGNLSQMGTLLPPRDKVLLYGDGNVKVVYMNEDDVAAYTIKTIDDPRTLNKTVYLRPPENILTQRQLIEKWEKLIGKQLEKSSINEQDFLASIKGLDYAAQVGVGHFYHIFYEGCLTNFEIGEGGEEASELYPEVKYTRMDEYLKVYKHEKLCI

SEQ ID NO: 52520 - protein, 340 aa, Glycine max
MASENPTADDAVNGFNRPEMFSENLAGTVDAYDRHVFLCYKSHLSWPPRIEASDADPFPKRVAATFKARKNDLPLKTKITVCEVREEAGFLDGDVLIFPDMIKYRGLEESNVDSFFEDVLVNGKPWTAGVPEVFSGSHVYVCAHGSRDVRCGVCGPVLIKKLNEEIELRCLKDQISVTACSHIGGHKYAGNVIIYCPGSDGKIMGHWYGYVTPDDVAALLDRQIAKGEVIKKLWRGQMGPPGAEIKVADDHKLANGVYNNKANLSNNENVTGCCQGVNGVSCCRTASFDDKTAEAYKKQGSNNISWCLPVLKKRDILTAGGILGALAAVAVAFRFYRRAS

SEQ ID NO: 52521 - protein, 367 aa, Glycine max
MRDGMNSRILLDAAKSCILASSPVFRRQQFLIRCVGGSTDQRDMQALRSLEVDSQSIIRAITPALDPTRHKGQAGNIAVIGGCREYTGAPYFSAISALKIGADLSHVFCTKDAAPVIKSYSPELIVHPVLEESYNVGEEHKSSIASKVLAEVDKWLERFDCLVVGPGLGRDPFLLDCVSEIMRHARRSNIPIVIDGDGLFLVTNNLELVSGYALAVLTPNVNEYKRLVQKVLSSEVNDIDAPQQLLSLAKQIGGVTILSKGNSDLISDGDTVKSVSVYGSPRRCGGQGDILSGSVAVFLSWARQHILAADSNSNLSCKNPIVLGCIAGSAILRKAASLAFSNKKRSTVTGDIIECLGRSLEDISPAC

SEQ ID NO: 52522 - protein, 161 aa, Salmonella enterica
VAGASLGLWEICIIWGLGISLAVYLTAGISGGHLNPAVTIALWLFACFPKQKVLPYIIAQFAGAFGGALLAYVLYSSLFTEFETAHHMVRGSVESLQLASIFSTYPAAALNVWQAALVEVVITSILMGMIMALTDDGNGIPKGPLAPLLIGILVAVIGAST

SEQ ID NO: 52523 - protein, 911 aa, Arabidopsis thaliana
MEDYGFEYSDEEQEEQDVDIENQYYNSKGMVETEPEEALSGFAEVVQMEPEKADWGFKALKQTVKIYYRLGKYKEMMEAYTEMLTYIKSAVTRNYSEKCINNIMDFVSGSASQNTGLLQEFYQTTLKALEEAKNERLWFKTNLKLCNIWFDIGEYRRMTKILKELHKSCQKEDGTDDQKKGSQLLEVYAIEIQIYTETKDNKKLKQLYHKALAIKSAIPHPRIMGIIRECGGKMHMAERQWEEAATDFFEAFKNYDEAGNQRRIQCLKYLVLANMLMESEVNPFDGQEAKPYKNDPEILAMTNLIAAYQRNEIIEFERILKSNRRTIMDDPFIRNYMEDLLKKVRTQVLLKLIKPYTKIGIPFISKELNVPETDVTELLVSLILDSRIDGHIDEMNRYLLRGDSGNGRKLHKAVDKWNSQLKSLSSNITSRQLDSNCKRWVICTGTLTNNVDVFFEEMNRRQQVKRRVGKYEVGRTIGEGTFAKVKFARNSETGEPVALKILDKEKVLKHKMAEQIRREIATMKLIKHPNVVQLYEVMASKTKIFIILEYVTGGELFDKIVNDGRMKEDEARRYFQQLIHAVDYCHSRGMVGLKHGILIEKLPMHILCAPENLLLDSYGNLKISDFGLSALSQQVRDDGLLHTSCGTPNYVAPEVLNDRGYDGATADMWSCGVVLYVLLAGYLPFDDSNLMNLYKKISSGEFNCPPWLSLGAMKLITRILDPNPMTRVTPQEVFEDEWFKKDYKPPVFEERDDSNMDDIDAVFKDSEEHLVTEKREEQPAAINAFEIISMSRGLNLENLFDPEQEFKRETRITLRGGANEIIEKIEEAAKPLGFDVQKKNYKMRLENVKAGRKGNLNVATEIFQVAPSLHMVQVSKSKGDTLEFHKFYKKLSNSLEQVVWTNNEVKKETAK

SEQ ID NO: 52524 - protein, 144 aa, Salmonella enterica
GLGISLAVYLTAGISGGHLNPAVTIALWLFACFPKQKVLPYIIAQFAGAFGGALLAYVLYSSLFTEFETAHHMVRGSVESLQLASIFSTYPAAALNVWQAALVEVVITSILMGMIMALTDDGNGIPKGPLAPLLIGILVAVIGA

SEQ ID NO: 52525 - protein, 326 aa, Rickettsia rickettsii
MDIKLGKYKPTKEEYIKSFKDMLLLRRFEEKCGQLYGMGEIGGFCHLYIGQEAVISAVDMVKQKGDSTITSYRDHAHIILAGTEPKYVLAELMGRATGCSKGKGGSMHLFNVPHKFYGGHGIVGAQVPIGTGLAFAEKYNDTHNICFTFLGDGAVNQGQVYEAFNMAALWGLPVVYIIENNEYSMGTSVARSTFMRDLYKKGASFGIKGFQLDGMDFKEMYDGSKQAAEYVRENSFPLILEVKTYRYRGHSMSDPAKYRSKEEVEQYKERDPLVIIRKTILDNKYVTEADLKAIEQSVKEIVKEAVEFSENSPLPDEGELYTQVYC

SEQ ID NO: 52526 - protein, 175 aa, Arabidopsis thaliana
  misc_feature (115)..(115): Xaa can be any naturally occurring amino acid
  misc_feature (122)..(122): Xaa can be any naturally occurring amino acid
  misc_feature (136)..(136): Xaa can be any naturally occurring amino acid
  misc_feature (138)..(138): Xaa can be any naturally occurring amino acid
  misc_feature (148)..(148): Xaa can be any naturally occurring amino acid
  unsure (1)..(175): unsure at all Xaa locations
NKDGIDIPALLKHTKEHRGVKGFDGADPIDPNSILVEDCDILVPAALGGVINRENANEIKAKFIIEAANHPTDPDADEILSKKGVVILPDIYANSGGVTVSYFEWVQNIQGFNVXEEEKVNXDELKTYHDSALSKXLXKEMCKTHSFXDLPEWEAFTPRGLNRVGQTHSPKGLGP

SEQ ID NO: 52527 - protein, 195 aa, Laccaria bicolor
DQISITHAVSTMRSKFKDEHPFEKRKAEAERIRQKYPDRIPVICEKADRTDIPTIDKKKYLVPSDLTVGQFVYVIRKRIKLAPEKAIFIFVDEVLPPTAALMSAIYEEHKDEDNFLYVSYSGENTFGQEGWVELPVDDMDKAFICVSAAKKHWVWVLCDVRSSYQNCVLIVPLVQRPVLHTHSSFLSVSFALLFV

SEQ ID NO: 52528 - protein, 343 aa, Triticum aestivum
  misc_feature (104)..(104): Xaa can be any naturally occurring amino acid
  misc_feature (208)..(208): Xaa can be any naturally occurring amino acid
  misc_feature (229)..(229): Xaa can be any naturally occurring amino acid
  misc_feature (272)..(272): Xaa can be any naturally occurring amino acid
  unsure (1)..(343): unsure at all Xaa locations
MGSTATDMAASADEEACMYALQLVSSSILPMTLKNAIELGLLETLVAAGGKLLTPAEVAAKLPSTANPAAADMVDRMLRLLASYNVVSCTMEEGKDGRLSRRYXAAPVCKFLTPNEDGVSMAALALMNQDKVLMESWYYLKDAVLDGGIPFNKAYGMSAFEYHGTDPRFNRVFNEGMKNHSIIITKKLLEVYKGFEGLGTIVDVGGGXVGATVGAIVAAYPAIKGINFXLPHVISEAPPFPGVTHVGGDWSDEHCATLLKNCYDALPAHGKXVVLVECILPVNPEATPKAQGVFHVDMIMLAHNPGGRERYEREFEALAKGAGFKAIKTTYIYANAFAIEFTK

SEQ ID NO: 52529 - protein, 436 aa, Xanthomonas campestris pv. campestris str. ATCC 33913
MLQGTPTSAHFVLERMTPFQWRAVAVCVLLTMLDGFDVMAMAFTAPHVSADWQLSGKLLGALFSAGLVGMAVGSLVLAPWADRIGRRALILVCLAILTVGMGASALAGTAWQLGALRAFTGVGIGGMLACVAVTAAEYSTARWRSTATVLQATGYPVGATIGGAIAALLLQHWSWPSVFWLGAFGALLCVPLVLACLPESLEFLIARRPPNAQARFNAVLARMGMPPHSQLPLPPAQAAGQVQGYAALFVGALRRQSLLIALAFFLLMFAFYFVLSWTPKLLVTAGLSAGQGVTGGVLLNLGGIVGGTLFSWLALRGRLSWLTAGALVLVAVGMVAFGLSSTVLSWAFATALLTGAALTAAMGGLYAVAPVVFTAAVRSTGMGWSIGIGRLGAIASPLCAGVLLDAGWSPAMLYLACGVPLLFAAAAVVAMRLPER

SEQ ID NO: 52530 - protein, 310 aa, Colletotrichum kahawae
NWAKGHYYEGAELVDQVLDVVRREAEGCDCLQGFQITHSLGGGTGAGMGTLLISKIREEFPDRMMATFSVVPSPKVSDTVVEPYNATLSVHQLVENSDETFCIDNEALYDICMRTLKLSNPSYGDLNHLVSAVMSGVTTCLRFPGQLNSDLRKLAVNMVPFPRLHFFMVGFAPLTSRGAHSFRAVSVPELTQQMFDPKNMMAASDFRNGRYLTCSAISRGKVAMKDVEDQMRNVQNKNSSYFVEWIPNNVQTALCSIPPRGLKMSSTFVGNSTAIQELFKRVGEQFTAMFRRKAFLHWYTGEGMDEMEFT

SEQ ID NO: 52531 - protein, 501 aa, Bifidobacterium longum NCC2705
MRLMFEALGPTFVKVGQILSMRSEILPQSFCDELAKLRADADPMPYSTVLDVLAAEYGRPADEVFAHIDPKPLGSASLAQVHRATLKTGEDVAIKVQRPGVRETMAQDVSIMRSIAKAATKVIRTSQIVDLKGVVEELWDTFESETDFLIEARNLAEFKRFAARFKYMDCPTAYTELCTEHVVVMEYIDGISVSHPGRLVDAGYDLKEIGTKLVDNYATQILDDGFFHADPHPGNIIIRGGQIVLIDLGMTGRLDQRTRAVLKEMIFAVAKQDSPALAEGLLRFAGTEADPEDYPALLADLDVIVKEFGTVDLAELDIAAFLTALTQMAGRHNIEVPSTVTTVGRALVTLEGLLDEFIPDVNMIEIISDHIATSKSLKNATKDEIKSLGVEGHQALHATLGTMTELKTVARMLTRGQLRVNMELVGSEEPFQLLSDMVNRLTMALIVVGLFVGSSIVYYAGMKPIIFGIPVIGFMGYVVAFALGVWIVIDIYLKGRKTKKR

SEQ ID NO: 52532 - protein, 692 aa, ASPERGILLUS NIDULANS FGSC A4
MGYTELDQLAINTIRLLAVDATAKANSGHPGAPMGMAPVAHVLFNKFMKFNPKNPEWANRDRFVLSYEAHFSCDNGHGCMLQYALLHLFGYGISMDDLKAFRQLDSITPGHPEAHDTPGIEVTTGPLGQGFANAVGLAIAQAHSGGVFNKPGYNLFDNYTYCFFGDGCAMEGVASEAASTAGHLKLGNLIAIYDDNHISIDGDTKCAFTEDVTKRFEAYGWHVVWVKDGDNDLEGIEAAIKEAQAVKDKPSMIRLTTTIGFGSKLQGTGGVHGNPLKADDIEGVKKRFGFDPAQSFVVPQQVYDLYHKHAEEGAAQEQEWNQLLQKYAGEYPNEHADLTRRLSGKLPEGWEKSLPVYKPSDPAIASRKLSEAVLEKIHSVIPELLSGSADLTGSNNTRWKNAVDFQPPEYGIGEWSGRYLRYGVREHAMAAIMNGLAAYGTVIPAAGTFLNFVSYAAGAVRLSALSRVRAIHVATHDSIGLGEDGPTHQPIETLAHFRALPNCMVWRPADGNETSAAYYSALTAKHTPSILALTRQNLPQLENSSIEAALKGAYPVFEAADAKVTIISTGSEVSICIDAAKYLQEKHGVVARVVSIPCFEVFDAQDKEYRLKVLPDGIPILSVEVCSTMGWERYSHEQFGLNRFGASGPYKEVYAKFEFTPEGISKRALATIDFYKGVPVRSPINRAFQQIL

SEQ ID NO: 52533 - protein, 539 aa, Oryza sativa
MAADGVLAGGGGCRDHVGATTARGDGRRDNSRRRHACVDGWGQDRARTRGDDGQRRYAQCRGGWGDIWRWGGLIRKQPDTTVYPGQICAAAGGGGGMADQTAAAVVVGGGAAATMGEPSPPPPAPAAEAAGVGVGQQQRTVPTPFLTKTYQLVDDPAVDDVISWNDDGSTFVVWRPAEFARDLLPKYFKHNNFSSFVRQLNTYGFRKIVPDRWEFANDCFRRGERRLLCEIHRRKVTPPAPAATTAAVAAAIPMALPVTTTRDGSPVLSGEEQVISSSSSPEPPLVLPQAPSGSGSGGVASGDVGDENERLRRENAQLARELSQMRKLCNNILLLMSKYASTQQLDAANASSAAGNNNNNNCSGESAEAATPLPLPAVLDLMPSCPGAASAAAPVSDNEEGMMSAKLFGVSIGRKRMRHDGGGDDDHAATVKAEPMDGRPHGKDEQSAETQAWPIYRPRPVYQPIRACNGYEYDRAGSDQDGHVQLRTCVNNLLVTGAGTLDAGREYETNSLPRPRRAKNSNDVPGMPNSLGQAPSPVA

SEQ ID NO: 52534 - protein, 523 aa, Rubrobacter xylanophilus DSM 9941
MPDHVEEPRAGRRPHVGEVGRVQLVGVPLVDPGARVYVYLLAVHPVDAPDDVVVGQRGGHPLHLLLVPRHVVYLYAEPQLHLPGPLPRLLESRQVHLLQVAVVLGDPQLADALLPGHPAVLQDVLNGHGPVVVGHHVQVVVDQAASRCLCTSSARRTPETNHIRYRQGLSGRRRIALLARAAYALTALLTAGVVAAELLHAPLALVFPLSAAALVGLAWVLGQATESLGHHAGPRVGGLLNATFGNAAELIITLFALAAGLTTVVKASIIGSIIGNALLVLGASMLLGGLKNGTQSFSATIAGINASMLAIVAAALALPTIFALTGPGGRPSPTSLSIEVAAVMLLLYLLYLLYYFRHPEAGAAAGSGHAPFGRLASLLLLLGSTAAVAYVSEAFVGSIEPLVEEFGISELFVGVILVPLVGNIAEHLVGVQIAYRNQMDFSMAISLGSSLQVALLVTPILVFLGPLLGHPLTLVFTPLELGSLAAAVAITSIIALDGRSNWLEGAMLCGVYAIAALAFFFSP

SEQ ID NO: 52535 - protein, 265 aa, Zea mays
GSRELSSDSSQHVRSALASVIMGMAPVLGKDATLEQLLPIFLSLLKDEFPDVRLNIISKLDQVNQVIGIDLLSQSLLPAIVELSEDRHWRVRLAIIEYIPLLASQLGVGFFDDKLGALCMQWLEDKVFSIRDAGANNLKRLTEEFGPEWAMQHIIPQVLEKINNPHYLYRMTTLQAISLLAPVMGPDITCQQLLPVVIASSKDRVPNMKFNVAKVLQSLVPILDQSVVEKTVKPCLVELSEDPDVDVRYYAHQALRACDQMVISS

SEQ ID NO: 52536 - protein, 225 aa, Zea mays
  misc_feature (178)..(178): Xaa can be any naturally occurring amino acid
  unsure (1)..(225): unsure at all Xaa locations
MAAGGDDTTIAQVHSGIDSSNKTLLKSEALYKYVLDTSVLPHEPESMRELRLVTDKHEWGFMQSSPDEASLLRMLIKLSGARRTLEVGVFTGYSLLATALALPADGKVIAFDVSREYYDIGRPFIERAGVAGKVDFREGPALEQLDELLADPANHGAFDFAFVDADKPNYVRYHEQLXPDAPLSDLDRRFSAAIRELNVRLSQDPRVEVCQLAIADGVTICRRVV

SEQ ID NO: 52537 - protein, 927 aa, Bacillus anthracis str. 'Ames Ancestor'
MLNSSNDVKTKFINDLVKQVEKNQFAGINIDFEAVPESDRENLTNFMKELTMVFHKHDLLVTQDVPANDKAFDYSALAKIIDRMIVMMYDEHYGAGEPGPIASNKWFQHTLKELNIPSNKLIVAFGNYGYDWKVNSKEPAKSLTFSEVMAMAHNSDINIQWDKMSGNPYFRYKTGDKEHTAWFLDGVTLYNQVKIAMDNNAKGFALWRLGAEDPTIWKVLKNPIEAQKNPDVLHKITSLDEVNYSGQGEILQIENEKQNGLRDFKVGKDGYLTDEVYQSLPSAYEVQRYGKPKGKQVVLTFDDGPDPKYTPEILDILKENKIKAAFFVLGENAQLNPSIVKRIYDEGHEIGNHTFKHPNVADTSLLRTKVELNTTQRLIQEITGHSTVLFRPPYEADANPDSSNEILPILRAQNMNYTMVAEKVDPEDWATPSTNELVKRALNPVYKGEGNIILLHDAGGNRTHTVEALPIIIKELKKHGYSFVTISDLMNKERDEIMPPVSSEGKQYLLYNKAVFSGAGYFKHILTTIFYIAIGLGIFRFLFLIYFAWKQKRKTLSRTIHSSYQPFVSVVIAAYNEEKVIAKTIRSILDSKYGEFEVIVVDDGSTDGTSKVMQETFYKHPKVRFIQKENGGKSSAMNLGFQQSRGEIIVTLDADTIIAQDAISLMVRHFEDQNVAAVSGNVKVGNRRNLLTTWQHVEYITGFNLERRAFDELNCITVVPGAIGAWRKKNVVESGYLSEDTLAEDTDLTITFLRQGHRIVYEEKAYAFTESPEDVKSLIKQRYRWSYGTLQCLWKHRKALCNSKHKTLGFIALPNMWLFQYVLQFIAPFADILMIIGLFSSDPLKVLGFYFVFFLMDLLASLFAFKLEEENPKPLVWLILQRFIYRQFMTYVVVKSIFSSIRGVAVGWNKLKRVGSVEHSTEHKEAS

SEQ ID NO: 52538 - protein, 144 aa, Saccharomyces cerevisiae [sequence omitted]

SEQ ID NO: 52539 - protein, 320 aa, Aeropyrum pernix K1
MTPPVGDVGLYTRVHSPAYLRHVLSTAESGLDWLDPDTYVGPGTLVALKRLGGASVEVYNIVRSGGEALLLGRPPGHHAGIRGRALGAPTAGFCIVNTAALIARMLSEQGKTVILDFDLHHGNGTQEIFYDDPDVYHVDVHQDPTTIYPGTGFPEDIGEGDAKGTKINIILPPNSGDDIYVSAARLALGILERLEPDYIVVSAGFDAYRGDNAFTVMRGGTAMYYLIGSELSRMARRGVAAVLEGGYGVGLRRALPAFAAGLANLENPYPDTEEESPPSVKRMYVAGLKRLAAAIKGLNRVVEEAVLEELERGGWEKRYG

SEQ ID NO: 52540 - protein, 500 aa, Coccidioides posadasii
MRGIIFWSLASATTLLYTVQALELVKRSSPAVVGFELERKKIVNPIEYDKRRRRRQSDSQVVNQVLDNEKTLYFCNITLGTPPQNLRMHIDTGSSDLWVNTPSSEICSDRRRLCEVGGTYDPRRSSSYRRINDDFNITYADGSGAAGDYVSDTLRFSDVTLRDFQFAVGYTSSSREGVLGIGYASNEVQVVLNRQRPYANLPQALLDGDFIKSNAYSIWLNDLGASRGEILFGGVNAAKFEGTLKTVPVVGVRRSRRDLAVALTGLSVRTGAGEQRFPSGNFPFSVVLDTGSSLTYLPDVITNEIFDAVSAVWDPNFGAAYVPCELANYDAQFVFTFSEPSISVSMDEMVISPGTSPTGETLRFRDGTEACIFGIAPAQVNIAILGDTFLRSAYVVYDLENNEISLAQTRFNVTNNEILEIESGTNGVPRATGVRDPVSSADITPSATLATTLTPISTLTPTMDGQPVSSTAGAAPTLKPEYPLGVIAGLAGAGMIFAAM

SEQ ID NO: 52541 - protein, 238 aa, Glycine max
  misc_feature (80)..(80): Xaa can be any naturally occurring amino acid
  unsure (1)..(238): unsure at all Xaa locations
SARALTSSSSTFIPKRYSFFFFLSILFALRSSSGGCSEYHHHHAPMATIGGLRDSQGSQNSVQTEALARFAVDEHNKKQXVRTQEQVVAGTLHHLTLEAIEAGEKKLYEAKVWVKPWLNFKELQEFKPAGDVPSFTSADLGVKKDGHQPGWQSVPTHDPQVQDAANHAIKTIQQRSNSLVPYELHEVADAKAEVIDDFAKFNLLLKVKRGQKEEKFKVEVHKNNQGGFHLNQMEQDHS

SEQ ID NO: 52542 - protein, 260 aa, Glycine max
KEEMAGESYEEAITSLTKLLSEKAELGGVAAAKIKELTAELDAAGSKPFNPEERIRTGFIHFKNEKFEKNPYLYGELAKGQSPKFMVFACSDSRVCPSHILDFQPGEAFMVRNIANMVPPYDKTKYSGAGAAIEYAVLHLKVENIVVIGHSCCGGIKGLMSIPDDGTTASEFIEHWVPPPTPAKSKVKTEASTLEFSEQCTNCEKEAVNVSLGNLLTYPFVRDAVVKKKTLALKGAHYNFVKGTFELWDLDFKISNSVSV

SEQ ID NO: 52543 - protein, 339 aa, Burkholderia fungorum LB400
MDTRSELQATIKAMVQPGKGLLAADESGPTIAKRFKTIGLESSEENRRAYRNLLLTTPGLGEFVSGVILYEETLGQKADDGTPFPQLAAKNGIVPGIKVDLGKIALALAPGDEITEGLDGLARRFVDYKRQGARFAKWRAVYNITASLPSRLAIEANADSLARYAAISQEAGIVPIVEPEVLMDGEHTIERSAEVTEAVLHAVFHALHRHRVVLEHILLKPSMVIAGSEHAQQSSTADIAAYTVRVLKRTVPSAVPGIVFLSGGQSPEEATANLDAMNRLGALPWNLSFSYGRALQEPPLQAWKGERSHVEQAQQALLKRARLNSAAALGKYEAAQEKS

SEQ ID NO: 52544 - protein, 512 aa, Rickettsia akari str. Hartford
MNLKIVLVIIILISSNVILAKENNKSLKLADQAENEFTAINSAPLKVSEAARYSFADIVEPLIPAVVNISTIEYVNSKSENAEKDPLQETNPLDFINYFLEKLNIPLNLEEIDQTPKIVPLGSGFIIEPNGLIVTNYHVIANVNKINIKLADNTELPAKLIGSDTKTDLALLKIDSDEPLPFVEFGDSNDARVGDWVIAIGNPFGNLGGTVTSGIISSKGRDIDIDTDNIVDNFIQTDAAINNGNSGGPMFNLDQKVIGVNTAIFSPLGTNIGIGFAIPSNTAKPIIERLKKDGKVSRGRLGVTIQDLTEEISEGLGLKDTNGVLVAKVQEDGPGDQAGIKTGDIIIEFGDIPVKNTKKLRVIIADTPINQEVKLKILRDKKVLELPIKITSDNEEVTNDSTEETNKEEITNKEENSLSITKNNITFSNITEALRKKYTIPQDKTGIVITNIDAEESSFKIGDLITNINQESVDDISKLEELYENAKKSNKQNILLLIERCDTSVFMPLSVV

SEQ ID NO: 52545 - protein, 447 aa, Geobacillus kaustophilus HTA426
MSISLSQEQTTSKKYVQVGQLFENMPVTREHWKAGLALFFSFVIEAWEMMIIILCSASIGTEFKLSGTQIGSLIGSIFLGMIPGCLIWGKLIDKFGRKKAMIYSLISYGIISLISAFSTDYGMLWWMRFLSGIGLAGLMVATFPYFEELLPVKVRGKATVYLASGWPVGYLLAIGITYLLGDMGWRWVIGISSIAGLWFLVVATFVPESPYWLAGRDRQKEAKEVIRRLSANRMDHELNDVELIVEKVKKGSFIEVFRGKFLRPTVLQLIINFCFSWGYWALSSWMPALLAKKGLSAPQGLGFMALSALFMFPGYMAASYLTGKFGRKKIMFTFVFLAAIGGFGFASSNSMAEMYVWNFVLSFFSLGAWGVWDTWMAELYPTEVRGVSYSLGATAQRVANAIAPSVIGAMLASNTSFLATVSFISCFLVITFIATLFLKEMEGQILH

SEQ ID NO: 52546 - protein, 1239 aa, Arabidopsis thaliana
MEFLVTVAEFSLWLLLIVLFGFLSVVVFEAWRRRHSNVSVETVTTLDDPKSIKPIPCPHITDPAEKYLSLIVPAYNEELRLPAALEETMDYLQDRASRDKSFSFEVVIVDDGSVDGTKRVAFDFIRKYTIDNIRVIPLGKNQGKGEAIRKLLLMLDADGATKVTDLEKLENQRKWYRNFLMKGFHLVVLLAAGPGIRDTQCGFKMFTRAAARRLFTNVHLKRWCFDVELVYLCKRFNIPMVEISVKWSEIPGSKVKNFEAFKFNGFSYKPPKNCKCILVAGEMPINYTNLLLMLRECKNFRCLLQVHGSLIVSGLKPHNQLINAYSLFQRQDLSRVIFDSVRDPGVVLWNSMIRGYTRAGLHREALGFFGYMSEEKGIDPDKYSFTFALKACAGSMDFKKGLRIHDLIAEMGLESDVYIGTALVEMYCKARDLVSARQVFDKMHVKDVVTWNTMVSGLAQNGCSSAALLLFHDMRSCCVDIDHVSLYNLIPAVSKLEKSDVCRCLHGLVIKKGFIFAFSSGLIDMYCNCADLYAAESVFEEVWRKDESSWGTMMAAYAHNGFFEEVLELFDLMRNYDVRMNKVAAASALQAAAYVGDLVKGIAIHDYAVQQGLIGDVSVATSLMSMYSKCGELEIAEQLFINIEDRDVVSWSAMIASYEQAGQHDEAISLFRDMMRIHIKPNAVTLTSVLQGCAGVAASRLGKSIHCYAIKADIESELETATAVISMYAKCGRFSPALKAFERLPIKDAVAFNALAQGYTQIGDANKAFDVYKNMKLHGVCPDSRTMVGMLQTCAFCSDYARGSCVYGQIIKHGFDSECHVAHALINMFTKCDALAAAIVLFDKCGFEKSTVSWNIMMNGYLLHGQAEEAVATFRQMKVEKFQPNAVTFVNIVRAAAELSALRVGMSVHSSLIQCGFCSQTPVGNSLVDMYAKCGMIESSEKCFIEISNKYIVSWNTMLSAYAAHGLASCAVSLFLSMQENELKPDSVSFLSVLSACRHAGLVEEGKRIFEEMGERHKIEAEVEHYACMVDLLGKAGLFGEAVEMMRRMRVKTSVGVWGALLNSSRMHCNLWLSNAALCQLVKLEPLNPSHYSQDRRLGELKLMSAEAIMVRASVLNDCLKSMSNAEKQGKRQVMIRPSSKVIIKFLTVMQKHGYIAEFEYVDDHRSGKIVVELNGRLNNCGVISPRYDLGVKEIEGWTAKLLPSRQFGYIVLTTSAGIMDHEEARKKNVGGKVLGFFY

SEQ ID NO: 52547 - protein, 400 aa, Treponema denticola ATCC 35405
MYNIIDLVKQKEAKIIQIRRDLHQIPELELSLPKTVDYVCKQLDALQIPYHKLVNGNAIVALIEGKEKGKCIAIRADMDALPIKENTGLSFASKHEGCMHACGHDGHMAMALGACMVLKELSSEFKGCVKILFQPGEEYPGGALPMIEEGCMENPKVDAVIGLHAGYIYPGVEKGKIGACKGPFFAAADKFKIIVKGYGAHGAYPHLSVDPVPIACEIVSGLQKIISRELPPTSHALISVGQIHGGSAFNIIPEEVFIEGTVRSADEKERSFIAKRIEDLASGISKSYRAEAKTVYDFRYPVLLNDKGFTEFFIESTKEILGEDSIHEISVPTMAGEDMAYFLQKAPGTFFVLSNPIIQKDGSIYPHHSDKFDMDESLFYKGTSAVLAAVLKYLNLGGLK

SEQ ID NO: 52548 - protein, 451 aa, Arabidopsis thaliana
MLIPNKKLREMNRRQQVKRRVGKYEVGRTIGEGTFAKVKFARNSETGEPVALKILDKEKVLKHKMAEQIRREIATMKLIKHPNVVQLYEVMASKTKIFIILEYVTGGELFDKIVNDGRMKEDEARRYFQQLIHAVDYCHSRGVYHRDLKPENLLLDSYGNLKISDFGLSALSQQVRDDGLLHTSCGTPNYVAPEVLNDRGYDGATADMWSCGVVLYVLLAGYLPFDDSNLMNLYKKISSGEFNCPPWLSLGAMKLITRILDPNPMTRVTPQEVFEDEWFKKDYKPPVFEERDDSNMDDIDAVFKDSEEHLVTEKREEQPAAINAFEIISMSRGLNLENLFDPEQEFKRETRITLRGGANEIIEKIEEAAKPLGFDVQKKNYKMRLENVKAGRKGNLNVATEIFQVAPSLHMVQVSKSKGDTLEFHKFYKKLSNSLEQVVWTNNEVKKETAK

SEQ ID NO: 52549 - protein, 198 aa, Oryza sativa (japonica cultivar-group)
MSTSRRRTLLKVIVLGDSGYVHKKFSQQYKATIGADFVTKEVLIEDRLVTLQIWDTAGQERFQSLGVAFYRGADCCVLVYDVNSNRSFDTLNTWHDEFLNQASPSDPKTFPFILLGNKIDVDGGKSRVVSEKKAMEWCSSKGNIPYFETSAKEDRNVDSAFLSVAKLALEHERDQDIYFQTVVPDPVPEAEQRSGCAC

SEQ ID NO: 52550 - protein, 134 aa, Salmonella enterica
GLWEICIIWGLGISLAVYLTAGISGGHLNPAVTIALWLFACFPKQKVLPYIIAQFAGAFGGALLAYVLYSSLFTEFETAHHMVRGSVESLQLASIFSTYPAAALNVWQAALVEVVITSILMGMIMALTDDGNGI

SEQ ID NO: 52551 - protein, 226 aa, Triticum aestivum
MELEAATRRFQLWLRGLRSLRRDLRTARWADDPAQLAKLVAGYVSHFADYCAARAELDPVWTLAAPWASPVERGAAHWLAGWRPTTLVHLLYTESGRRFEAQLPDLLLGVRSGNLGDLSPAQLAQIDELQRRTVAQEDELSREMARVQEGHGAVGAGGELVDVGGLVGRVGAVLAGADALRLRTMKRAVEILEPAQAAELLVAAADMEIGFREFGLKYDGVGAGGS

SEQ ID NO: 52552 - protein, 63 aa, Nostoc punctiforme PCC 73102
MKLVRYLLGLLVPPLGVFLTVGIGPTLFINILLTVLGWLPGSIHAIWVIAKHDEQLNREGGIY

SEQ ID NO: 52553 - protein, 242 aa, Vibrio vulnificus YJ016
MSAHHLPIFVLLCHNVSNNTYLVKAVLMKFNAAIFDMDGLLLDTERVCMRIFKQACDVQKLPFYQETYLSIIGRNSAGIDAILRAAYGDDLDRLHAEWRKRYNQVVLHEAIPVKEGVIALLEWLKSHQIPAAVATSTQKDVALVKLKLAGLDHYFESITTGCEVTHGKPDPEIYLLAASRLNVPPAQCLAFEDSNNGVRAAVAANMMTYQIPDLVEPCEEVIAFGHRICPSLTEVLKELQPD

SEQ ID NO: 52554 - protein, 247 aa, Pirellula sp.
MSQSNSDDSASSSTQQAGDGQDDVQQNIVWHAHTVSREDRESKLGQRGVVVWFTGLSGCGKSTIANELDRLLIDRGATCTLLDGDNVRHGLCAPPSVLKEEHGEDFAGRFGLGFGPTDREENIRRIGAVTELFASAGVIVLAAFVSPYQRDRDRVRNTIESSGRAGDFLEVFVDTPLEICKQRDPKGLYQKAIAGEIKNFTGISDPYDAPPSPEIHLKWREGQTPHDQASEIIREMEKRGVLGPAKG

SEQ ID NO: 52555 - protein, 328 aa, Bacillus cereus ATCC 14579
MKAIVVTSFGGPEVMKYTDFDIPAISEDQVLIRVVATSVNFADIKSRYGKKGNKALPFILGIDATGIVERVGSHVKNIHPGQRVIAFPQNGSYAEYVVANENLTFVLPHEVDFQTAAACPIVSFTSYNLLANVARLQQGESVLIHAAAGGIGTTAIQLAKLLEAGTVIGTVGSEAKKEIALDAGADYVICHQDEDFVEKVNELTNGEGVDVILDSISGTVSERSLNCLAYYGRLVHFGNASGEIGNFQTKDLHASCRSILGFSFGTTRKKRPELLQETANEVFRYLRDGRLQIKATKSFPLQDAGKAHEWVESRKSTGKVILTVQSSS

SEQ ID NO: 52556 - protein, 559 aa, Bacillus cereus ATCC 14579
MDDVVTESRNPISKFFAKIGRQKRYMRVSSIAIKHGMGKYLALKRSPEADRKLATSLRNTLEECGGVFIKFGQVLSTRSDLLPPVFIHELSNLQENVTRLSQKQVEEILKKELHTPKDEIFSSFEMEPLAAASIGQVHKAKLKENDQDVVVKLLRPNISETIKRDLDILIHFSLWISNKSTWAKNIGFLDLAHGFSIAMKEEIDFKIEARNFEQVSDSLKNSETKVKIPKVYKKYSNSKILVLEFLDGVSVKSGSALLNELQIDTKKVQRQLFDCILEQIFFKGIFHADPHPGNVYILRDGTPALLDFGSVGRLGTLQQDAFKRLLIGFERKNSYVLLDGLLQLVEKKPNVDKEGLEQSISQLLIQSTYGSTNGSEEFIQGLFQIIAEFELAFYPMVAGAFRSLITLEGTMLQLNPEFNLMDEAKRFAKDHAASFMPVNNYSSLKEAATNELLAMLPAMRRIPRKLDDLSSKLENGELSVKVGFFSDETNASFITTFISQFLIAFIGTAFGGISVGVLHLANSATEPNDQFLSVVGYGGLFISAILLVRVAIHAVRKFK

SEQ ID NO: 52557 - protein, 274 aa, Xanthomonas campestris pv. campestris str. ATCC 33913
MSRQLVGELISEAVAMFIIIALGDSVAAMYILYDPSPYQNAYWGVCIAWGLAVTLAIYVTGSVSGTHANPAVTLALALFRDFSWKKVLPYWGAQVVGAFLGAAIVYQLYGPVIDHYNQVQQLTREAGGAAGVFFTAPGLAVTPMHALVDQIIITAFLIFGIFAITERFNEAAPTANSGALMIGLLVATLGASMGYLEAWAMNPARDFGPRLFAYFAGWGEAALPAKDNYWWIPIVGPLIGGPLGALAYQWLILPFLPARVLHLQKAATPPLDPP

SEQ ID NO: 52558 - protein, 316 aa, Antirrhinum majus
MGRPPCCDKIGVKKGPWTPEEDIILVSYIQEHGPGNWRAIPSNTGLLRCSKSCRLRWTNYLRPGIKRGDFTEHEEKMIIHLQALLGNRWAAIASYLPHRTDNDIKNYWNTHLKKKLEKLQSPENGKCQDGNSSVDSDKSVSKGQWERRLQTDIHMAKQALCDALSLDKTSSSTDDPKLSTVQTTQPRPFQASTYSSAENIARLLENWKKKSPVNASSTSQAGSSESTTTSFNYPSVCLSTSSPSEGAISTNFISFNSSNSDILEDHDQAKFEAATNGVNFQDESKPILDNQMPLSLLEKWLLDDSAAVAQGQDVDF

SEQ ID NO: 52559 - protein, 431 aa, Bifidobacterium longum NCC2705
MGAIDSGNTAWILTSASLVFLMTPGVAFFYGGMVRAKAVLNMLMLEAAALSVTMIVWTLWGWSIAYAGSDIGGIFGDPASGFLLKDSMVAQDGVFTATGLNGNNYPVSVDVAFQVAFAMITVGLICGAIAERVKYSTWMIFVALWVTFDYAPMAHMVWNGGLLSADGAISKAIGAAAHDFAGGTVVHINAAVAALIIVLIIGKRKGFGTQPFRPHNVPFVMLGAFLLWFGWFGFNAGSAFAANGTAGYAWVSTSAATAAAMLSWGFTEKIRSGHYTAMGAASGMVAGLVAITPAADVVSPLWAIVMGAIAGVLTCLACGLKFKFGYDDSLDVVGVHGVGGFTGTILIGFFGEGTGLLAGGDWKQLVVQLVIALVAILYSAVITAIIAFALEKTIGWRVTEAQEVGGIDLADQGERAYDFAGTASSVLKEVK

SEQ ID NO: 52560 - protein, 273 aa, Lycopersicon esculentum
MGRSPCCEKAHTNKGAWTKEEDERLISYIRAHGEGCWRSLPKAAGLLRCGKSCRLRWINYLRPDLKRGNFTEEEDELIIKLHSLLGNKWSLIAGRLPGRTDNEIKNYWNTHIRRKLLSRGIDPTTHRSINDPTTIPKVTTITFAAAHENIKDIDQQDEMINIKAEFVETSKESDNNEIIQEKSSSCLPDLNLELRISPPHHQQLDHHRHHQRSSSLCFTCSLGIQNSKDCSCGSESNGNGWSNNMVSMNIMAGYDFLGLKTNGLLDYRTLETK

SEQ ID NO: 52561 - protein, 453 aa, GIBBERELLA ZEAE PH-1
MADFKAYLDELEQDFVIDTAKLKHVTNHFVQELEKGLSIKGGSIPMNPTWVTNYPDGNEKGKSLVLDMGGTNLRVYSIQLTSEKGGFEVKQESHKLPEELKTATADELWDFIAGCLDSFLQSADFDLSTEIDLSFIFSFPTTQRTIDEGILQRWTKGFNISNTEGKDAAESLRQAIKKKNLPLKVRVVTNDTTATMMASAYLNSDTEIGCVFGTGCNGAYFEKVGAIPKLANDNLNGESFMAINCEWGAFDNEHAVLPLTSYDIAIDEDSPRKGQQAFEKMVAGLYLGELFRRIILEIHQRDPHTFLEGQSMERLNDTYCLDSSFLSAIEEDASDGLREAYETCVSSLGISPTLAELQFMKAVATLITTRAARLSATGVAAICQKRDLQQCHVGVEGSLFEKHPHFQLELSKAVGEILAPVAEPDTRKSNVEFMLSPGSGVGAAVIASTLKER

SEQ ID NO: 52562 - protein, 245 aa, Arabidopsis thaliana
MDAISSLGTNCVLSGVSPFSQENQSKSKLSPFMSLDLKEHPMASADFTNQTLTAFSSSSASPFQAKTSSIGMSRGMRWWEKSTNHNMLEIQSANHLVDSLLNAGDRLVVLDFYSPGCGGCKSLHPKICQLAETNPNVMFLKVNQEELRTMCHGLNVHVLPFFKFYRGAEGKVCSFSCTIATINKFKKALDKHGSERCSLGDAKGLDEKELAALASVGELKMNSLTMHQASNIGYKTEEQYQTMVL

SEQ ID NO: 52563 - protein, 385 aa, GIBBERELLA ZEAE PH-1
MVSAWSKIAMAASLAASVTAQTYTSCNPMKKSCDPDVGLAASSYTVDFTKGADDDNWEGTGHGDVKYTSDGAEFTIDKEGQSPTIQTKWHMFFGRLEVHLKAAPGQGIVSSIVFLSDVLDEIDWEFLGGRPNEAQSNWYAKASTDNTQSLTFPVDNAQADFHNYTVHWTSESIEWYIDSTKVRTLAYPSGGVNYPQTPMRIKLGIWAGGDPTNAEGTIEWAGGETQYQDAPFTMTVQKVMVQNLNPADSYTYGDETGSYKSIKFDKKDNGSDDEDKDEDKDETESTTASTTASKTDSKTTESATETATATDSDSESTTMSTARSSETGSSDFKNNKAEETSGSETGTSTGSSASSTAKSDENSASGNMPKMWLSLGVLCGAMLLL

SEQ ID NO: 52564 - protein, 1165 aa, GIBBERELLA ZEAE PH-1
MDLRNILDATDFYSNFTAALSTFSLDHLDSPTLNLQIIIQEGNSADGDRSGSLETNEEPILQSGHLLLSHKIPLRIGNGSCSIEPASPSLVSREPSPELRIPTNQRQVEIQRRTQSHKSHKRQGGLRLAAVNGDVPVEGDVDNANPRQMQVGQENFPKRVKVKHDGVFHPKESSLGKFVAGVWEQIHSGVILEPHVLTEQVQLTSRSSGNSPSGDLVSTAPSIRPDQTWESFNRSNIFCQRVTQASRTCRSIEVIVQARWVELFDSYVEYLASTNPNLSMTKCRMRAIAEACTDFGWTEKELRNKMGIWRGYKEIKDVLGWVALVFSGMGLYRLCKYRVDFDKDKFSRARTLGKRMEVAADTLHTNWRQLLAIVGESTEPRFAGHPHDWVVQQDGSDPVPLRSTYLAYDSNFTFEHLEESIIDTALWGADDPRWTPPSSAICLSGINVCDLCSEVQSNESAVNACKCFPNLFGVPRLPIAVQVFCTSNGRNNGLQALVAFERGTAIGEFVGLITKDIEEQDVMDSQAGGTRYQIWQGKQGNFTRFANHSCKPNAQFEKFVWLGTQHIVMNNTADIPLLFRFNMINRKIPLASYLFTRLKQAGTRRIYGVPGDFTLRALDHVPRSGIQFVGCCNELNAGYAADGYARAQRHRLQSGLGALITTYGVGELSAANAVAGSYAEHLPVVHIVGTPSQKARQVSTTSVGGRSPHLHIHHTLADSRIGVFREIAEKFTVAQLDLSGVDAEDVPTKVDEVLAKALYHSRPVYVELPSDAVETVVSSTLLERPIEERHTINDESSHLETREMADSLLQRLYAAKRPLILVDRGDGIETIRPDINEFVQKSGIPTLSLPSGASMVNNSLPNYFGVYSGSIGIVDLTSAVKSADLVLAFGCQFSDTQTLGWGVVPERNSMIMIGRNNIEDHQTGTGEILRMVTANLDKRSLAEQDTSSWGNFRHLPSQTVEPASPINQDEFYIHLNKYLKDDDNILLGNATPIIGGRDFVLPPSSQLIASGMWFSIGHMLPAAMGVSQAKADQGSSGRTILLDGDGSFQMTAQELSTIIHKRVNMVVFIINNSGYTYERYIHGMDEEYNDVAPWNYSLGPNLFGQAPDGYPIQSCRVHTWKELDSVLNSEGFSTGKGLTLVDIVIDKYDISERAKALFELVNKQL

SEQ ID NO: 52565 - protein, 138 aa, Leptospira interrogans serovar Copenhageni str. Fiocruz L1-130
MQSEVFKDPIVFFDGICNLCNSVVLFFLDRNRKGNLKFASLQSMAAERILGKKVGLNDSPSSVLFLEDGILYQKSNAILKISAHLCFPWNIFPLFKWVPGCIRDYIYDWIARNRYRWFGRLEICRIPDPSLKHRFLDD

SEQ ID NO: 52566 - protein, 458 aa, Listeria monocytogenes EGD-e
MAQTSTIQNDTKAAEEYAARVFETIKQRNPGETEFHQAVEEFLNSVIPALAKEPKYEANGILEQLTEPERLISFRVPWVDDSGTVHVNRGYRVQFNSAIGPYKGGLRFHPSVTGSIVKFLGFEQIFKNSLTGLPIGGGKGGSDFDPKGKSDSEVMRFCQSFMTELQKHIGPDTDVPAGDIGVGGREIGYLFGQYKRLRGAYDAGTITGKGLSYGGSLARTEATGYGLVYFTVEMLEAAGETIRGKKIVVSGSGNVAIYAIEKAHELGAKVVACSDSAGFVYDKEGIKVETVKQLKEVERKRISEYTTIHPSAEYYAGGDVWSVPCDIALPCATQNEINADQARALVKNGVIAVAEGANMPSTLDAVDIYHENKVLFGPAKAANAGGVAVSALEMAQNSTRMSWTFQTVDEHLQNIMKDIYKNSSNAASEYGAPGNLVIGANIAGFLKVADTMISQGII

SEQ ID NO: 52567 - protein, 400 aa, Magnaporthe grisea 70-15
MATTQTTQGQIQPCRYKVGKTLGAGSYSVVKECVHIDTGRYYAAKVINKRLMAGREHMVRNEIAVLKKVSMGHQNILTLVDYFETMNNLYLVTDLALGGELFDRICRKGSYYESDAVDLIRATLSAVAYLHDHGIVHRDLKPENLLFRTPEDNADLLIADFGLSRIMDEEQFHVLTTTCGTPGYMAPEIFKKTGHGKPVDIWALGVITYFLLCGYTPFDRDSDLEEMQAILNADYSFTPIEFWRGVSDSAKDFIRRCLTIDPTKRMSAHEALQHPFVAGYLADKGANLLPTVKKNFNARRTLHAAIDTVRAINKLREGQGLNGQRLMAGVKSREPNKAAAAAAAAASIPTSTGEVGTVGAATHKDSGYGSTRPDALRPGVETNKVVETSKGLWTGVGSRG

SEQ ID NO: 52568 - protein, 243 aa, Arabidopsis thaliana
MRFDPGARTALAFVTLTNEGEREFMFYRNPSADMLLEESELDFDLIKKAKIFHYGSISLITEPCKSAHISAAKAAKEAGVILSYDPNLRLPLWPSADNAREEILSIWETADIIKISEEEIVFLTKGEDPYDDNVVRKLFHPKLKLLLVTEGPEGCRYYTKDFSGRVHGLKVDVVDTTGAGDAFVAGILSQLANDLSLLQDEERLREALMFANACGALTVKVRGAIPALPTKEAVHEALLKAVV

SEQ ID NO: 52569 - protein, 596 aa, Rickettsia akari str. Hartford
MNKAYNIIHHKFDVVVVGAGGAGLRSAFGMAQEGLDTACITKLFPTRSHTVAAQGGISAALGNMGEDDWRWHMYDTVKGSDWLGDQDAIEYMCKNAPDAILELEHYGVPFSRTKEGKIYQRPFGGMTTEYGKGKAAQRTCAAADRTGHAILHTLYQQSLKHKVQFFVEYFAIDLLMEDGECRGVVAWNLDDGRLHCFRAHNVVLATGGYGRAYFSATSAHTCTGDGGGMAIRAGLPLQDMEFVQFHPTGIYSAGCLITEGARGEGGYLVNVNGERFMERYAPAAKDLASRDVVSRAMTIEIREGRGVGEHKDHVFLHLNHLSPEILHSRLPGIVETAKIFAGVDVTKEPIPVLPTVHYNMGGIPTNYHGQVIIKDGKNHNSVVKGLMAIGEAACVSVHGANRLGSNSLLDLVVFGRSSALKAAELIKPASPHKPLKEESLEKIINRFDKIRYNNGNILTADLRLKMQRTMQSHASVFRTQEVLDEGAGMISEIRSGYKDIKINDKSLIWNSDLVEALELDNLLDQALVTVYSAAARKESRGAHAREDYPGRNDEDWMKHTLSSIDAAGKVVLDYKPVTLTTLTDEISTIPPAKRVY

SEQ ID NO: 52570 - protein, 533 aa, Zea mays
MQIFVKTLTGKTITLEVESSDTIDNVKAKIQDKEGIPPDQQRLIFAGKQLEDGRTLADYNIQKESTLHLVLRLRGGMQIFVKTLTGKTITLEVESSDTIDNVKAKIQDKEGIPPDQQRLIFAGKQLEDGRTLADYNIQKESTLHLVLRLRGGMQIFVKTLTGKTITLEVESSDTIDNVKAKIQDKEGIPPDQQRLIFAGKQLEDGRTLADYNIQKESTLHLVLRLRGGMQIFVKTLTGKTITLEVESSDTIDNVKAKIQDKEGIPPDQQRLIFAGKQLEDGRTLADYNIQKESTLHLVLRLRGGMQIFVKTLTGKTITLEVESSDTIDNVKAKIQDKEGIPPDQQRLIFAGKQLEDGRTLADYNIQKESTLHLVLRLRGGMQIFVKTLTGKTITLEVESSDTIDNVKAKIQDKEGIPPDQQRLIFAGKQLEDGRTLADYNIQKESTLHLVLRLRGGMQIFVKTLTGKTITLEVESSDTIDNVKAKIQDKEGIPPDQQRLIFAGKQLEDGRTLADYNIQKESTLHLVLRLRGGQ

SEQ ID NO: 52571 - protein, 307 aa, Arabidopsis thaliana
MNAYSVSLDFTKPSLFTRITLSSQIPLTMATTVNKTVRVAAAQMTSVNDLMTNFATCSRLVQEAALAGAKLICFPENFSFVGDKEGESVKIAEPLDGPVMERYCSLARDSNIWLSLGGFQERFDDTHLCNTHVVIDDAGMIRDTYQKMHLFDVDVPGGSSYKESSFTVPGTKIVSVDSPVGRLGLTVCYDLRFPKIYQQLRFEQKAQVLLVPSAFTKVTGEAHWEILLRARAIETQCYVIAAAQAGKHNEKRESYGDTLIIDPWGTVVGRLPDRVSTGIVVADIDFSLIDSVRTKMPIDKQRVSIDL

SEQ ID NO: 52572 - protein, 312 aa, Arabidopsis thaliana
MEIASQEDHDMPIPLNTTFGGGGSHGHMIHHHDHHAANSAPPTHNNNNTTQPPPMPLHGNGHGNNYDHHHHQDPHHVGYNAIIKKPMIKYKECLKNHAAAMGGNATDGCGEFMPSGEDGSIEALTCSACNCHRNFHRKEVEGELAATAMSPYHQHPPHRKLMLNHQKIRSAMPHQMIMPIGVSNYRYMHNNSESEDFMEEDGVTTASRSLPNLPYNQKKRFRTKFTPEQKEKMLSFAEKVGWKIQRQEDCVVQRFCEEIGVKRRVLKVWMHNNKIHFSKKNNINLEDNDNEKINNLNNVDLSGNNDMTKIVP

SEQ ID NO: 52573 - protein, 156 aa, Salmonella enterica
GASLGLWEICIIWGLGISLAVYLTAGISGGHLNPAVTIALWLFACFPKQKVLPYIIAQFAGAFGGALLAYVLYSSLFTEFETAHHMVRGSVESLQLASIFSTYPAAALNVWQAALVEVVITSILMGMIMALTDDGNGIPKGPLAPLLIGILVAVIG

SEQ ID NO: 52574 - protein, 528 aa, Arabidopsis thaliana
MGNCCSHGRDSADNGDALENGASASNAANSTGPTAEASVPQSKHAPPSPPPATKQGPIGPVLGRPMEDVKASYSLGKELGRGQFGVTHLCTQKSTGHQFACKTIAKRKLVNKEDIEDVRREVQIMHHLTGQPNIVELKGAYEDKHSVHLVMELCAGGELFDRIIAKGHYSERAAASLLRTIVQIVHTCHSMGVIHRDLKPENFLLLNKDENSPLKATDFGLSVFYKPGEVFKDIVGSAYYIAPEVLKRKYGPEADIWSIGVMLYILLCGVPPFWAESENGIFNAILRGHVDFSSDPWPSISPQAKDLVKKMLNSDPKQRLTAAQVLNHPWIKEDGEAPDVPLDNAVMSRLKQFKAMNNFKKVALRVIAGCLSEEEIMGLKEMFKGMDTDSSGTITLEELRQGLAKQGTRLSEYEVQQLMEAADADGNGTIDYGEFIAATMHINRLDREEHLYSAFQHFDKDNSGYITMEELEQALREFGMNDGRDIKEIISEVDGDNDGRINYDEFVAMMRKGNPDPIPKKRRELSFK

SEQ ID NO: 52575 - protein, 214 aa, Gracilaria lemaneiformis
MARSDDEYDYLFKVVLIGDAGVGKSNLLSRFTRNEFSLESKSTIGAEFATRSIQCEGKIIKAQIWDTAGQERYRAITSAYYRGAVGALLVYDITKKDSFDNVQRWLKELKDHADANIVIMLVGNKSDLQHLKAVTTDDASAFAESNGLSFIETSALDNSTVEEAFRSILSEIYRLGSKKALEKGSTSNFAPNATQTIVINPPADEGKTEKAKCC

SEQ ID NO: 52576 - protein, 160 aa, Bacillus cereus E33L
MTVYDFSAKTITGEEKSLKDYEGKVLLIVNVASKCGFTPQYKGLQEVYDKYKGQGLEILGFPCNQFGGQEPGTEADITSFCELNYGVNFPMFAKIDVKGDKAHPLYTYMTEQAPGLLGMKAVKWNFTKFLIGKDGKVVGRFAPQTKPVDLEVEIEKVLGE

SEQ ID NO: 52577 - protein, 501 aa, Rhodopseudomonas palustris CGA009
MPAAIAFSSRIRPLRIRPLLAALCLGAAVIAGPAPASARGPEGIADVAEKVIDAVVNISTTQTVDAKGSGESKGGAAPQLPPGSPFEEFFEDFFKNRRGEKGGGPRKTNSLGSGFIIDPAGVVVTNNHVIADSDEINVILNDGTKIKAELVGVDKKTDLAVLKFKPPAGKTLTAVKFGDSDKLRLGEWVIAIGNPFSLGGTVTAGIVSARNRDINSGPYDSYIQTDAAINRGNSGGPLFNLAGEVIGVNTLIISPSGGSIGIGFAVPSKTVVPVVDQLRQFGELRRGWLGVRIQQVTDEIAESLSIKPARGALVAGVDDKGPAKPAGIEPGDVVVKFDGKDIKEPKDLSRIVADTAVGKTVDVVVIRKGKEETKQVTLGRLDDDAKPQPASAKSQPEADKPVTQKVLGLDLAALSKDLRGRYKIKDSVKGVLVTGVDDGSDAAEKRLSAGDVIVEVAQESVGSAADIKKRVDQLKKDGKKSVLLLVANASGELRFVALSLQ

SEQ ID NO: 52578 - protein, 307 aa, Triticum aestivum
MAPSLLRPASPCRPLAPAPCAAGPGRSRGTVSIGDSRARGVALRAAGSGRSDFSCTTKASTDHSGLTRQLLDFQHDTVDETDGGYDPFSQLKERFTDFKQRNYVENFTNYQKLAEQQTPEFMVVACADSRVCPTSILGLQPGDAFTVRNVANLVPPYEHGASETTAALEFAVNSLQVPNVLVVGHSRCGGIQALMSMKSKKDDRSSRTFIRDWVSLGKSARLSTEAAAGNLSFESQCRHCEKESINSSLLNLLTYPWIEERVKEGNLNLHGGYYNFIDCTFEKWTLVYLPGRHRASKYAIKNRSTWS

SEQ ID NO: 52579 - protein, 153 aa, Daucus carota
  misc_feature (65)..(65): Xaa can be any naturally occurring amino acid
  unsure (1)..(153): unsure at all Xaa locations
DPKHLRRPQQRLRPLLPRHLRPLPRLPQRSLHRYRGRTERSHGTCNMRIDWKETPDDVFKADMPXLKKEEVKVEVEEGRVLQISGERSREQEEKNDKYHRVERSSGKFLRRFRLPENVKMEEVKACMENGVLTVTVRKWRRRSRNVKAIDISG

SEQ ID NO: 52580 - protein, 151 aa, Salmonella enterica
WGLGISLAVYLTAGISGGHLNPAVTIALWLFACFPKQKVLPYIIAQFAGAFGGALLAYVLYSSLFTEFETAHHMVRGSVESLQLASIFSTYPAAALNVWQAALVEVVITSILMGMIMALTDDGNGIPKGPLAPLLIGILVAVIGASTGPLT

SEQ ID NO: 52581 - protein, 214 aa, Gracilaria lemaneiformis
MARSDDEYDYLFKVVLIGDAGVGKSNLLSRFTRNEFSLESKSTIGVEFATRSIQCEGKIIKAQIWDTAGQERYRAITSAYYRGAVGALLVYDITKKDSFDNVQRWLKELKDHADANIVIMLVGNKSDLQHLKAVTTDDASAFAESNGLSFIETSALDNSNVEEAFRSILSEIYRLGSKKALEKGSTSNFAPNATQTIVINPPADEGKTEKAKCC

SEQ ID NO: 52582 - protein, 321 aa, Arabidopsis thaliana
MAQLPPKIPNMTQHWPDFSSQKLSPFSTPTATAVATATTTVQNPSWVDEFLDFSASRRGNHRRSISDSIAFLEAPTVSIEDHQFDRFDDEQFMSMFTDDDNLHSNPSHINNKNNNVGPTGSSSNTSTPSNSFNDDNKELPPSDHNMNNNINNNYNDEVQSQCKMEPEDGTASNNNSGDSSGNRILDPKRVKRILANRQSAQRSRVRKLQYISELERSVTSLQAEVSVLSPRVAFLDHQRLLLNVDNSALKQRIAALSQDKLFKDAHQEALKREIERLRQVYNQQSLTNVENANHLSATGAGATPAVDIKSSVETEQLLNVS

SEQ ID NO: 52583 - protein, 237 aa, Lycopersicon esculentum
MMKSQKKLLIKIIVVQCLLVLCVTSQDFDFFYFVQQWPASYCDTRRSCCYPTTGKPDEDFSIHGLWPNYKDGKWPQNCDRESSLDESEFSDLISTMEKNWPSLACPSSDGLKFWSHEWLKHGTCSALNQHAYFQTALDFKTKSNLLQNLNNAGIKPRNGDYYGVESIKKAIEKGVGHTPFIECNVDSQGNHQLYQVYLCVDSSASKFIDCPIFPHGGKCGSKIEFPSFSTNDDHDEF

SEQ ID NO: 52584 - protein, 590 aa, Treponema denticola ATCC 35405
MNKIFKQIEKIGIVPVIVLDNEKDAFPLGKALSTAGLLCAEITFRTEAAEKAIKVFAKNFPDFLIGAGTILSPEQADKAIAAGAKFIVSPGLNPKVVEHCVNLGYPIIPGVSTAGEIEQAMSFGLEVVKFFPAEAAGGLKFIKALSAPYPNIKFMPTGGINAQNIAEYAAFSKVIACGGSWMVSKELISSKDFKKIEEESSIALQIVKEARNPKKSPSALTAFSYPKTSTETKSSISNESSLSGSIETNKAPKVITMGEIMLRLSPTGFNRFVQADALELVFGGAEANVAVSLANFGMQSSYITKLPSHEIGQAAVNSLRRYGVDVSGIVRGGKRVGIYFLEKGASQRASKVIYDRANSAIAEASLSDFNWKEIFKGASWFHFTGITPALSKNAAEICLEACKTARSMGITVSCDLNYRKKLWTPDEAKETMSSICEFVDICISNEEDAEQVFGITSKNTVVSSGKLNEKGYKEVAAKLCKKFGFQKVGITLRESTSASENNWSAMLYTKGKAYFSKKYTMQVVDRLGGGDSFAAALICAELKGFKPQKQIDFASAASCLKHSINGDFNQVSFDEVLTLAKGDASGRVQR

SEQ ID NO: 52585 - protein, 188 aa, Triticum aestivum
AYLGDTIEQVCTKKQAGTGPEFPGYRRPTRPSLSVARRGEADRYIQMEGLQRSSSTFRRSGSSGLVWDERFLTEGAEAKAAGEGGTDEAQPEMRRSRSTGGVGMMLRRGGDDKKQQQQKKKEQQGQKKDEERDPQVFRTKEVAPDVDPPSPKVSGCILCAIFGGSSSGPGAAARRGRAKPKRRQRSAV

SEQ ID NO: 52586 - protein, 128 aa, Salmonella enterica
ICIIWGLGISLAVYLTAGISGGHLNPAVTIALWLFACFPKQKVLPYIIAQFAGAFGGALLAYVLYSSLFTEFETAHHMVRGSVESLQLASIFSTYPAAALNVWQAALVEVVITSILMGMIMALTDDGN

SEQ ID NO: 52587 - protein, 160 aa, Bacillus cereus ATCC 14579
MTVYDFSAKTITGEEKSLKDYKGKALLIVNVASKCGFTPQYKGLQEVYDKYKDQGLEILGFPCNQFGGQEPGTEADITSFCELNYGVNFPMFAKVDVKGDKAHPLYTYMTEQAPGLLGMKAVKWNFTKFLIGKDGKVVGRFAPQTKPVDLEVEIEKVLGE

SEQ ID NO: 52588 - protein, 358 aa, Xanthomonas campestris pv. campestris str. ATCC 33913
MSQSKPLFPLNAWYAVAWDHEVKHALTPRKLCNLDVVLYRTTAGAVVALEDACWHRLVPLSMGKLRGDDVVCGYHGLVYNAQGRCVHMPSQETINPSACVRGFPVAEKHRYVWVWPGDPAQADVALIPDLHWSHDPAWAGDGRTIHAKCDYRLVLDNLMDLTHETFVHGSSIGQDEVAEAPFEVVHGDRTVTVSRWMHNIDPPPFWAGQIARHLNYHGKVDRWQIIHFEAPGTIAIDVGVAITGTGAPQGDRSQGVNGFVLNTITPETDTTCHYFWAFMRNYALHDQSLTTLTREGVTGVFGEDEAVLEAQQRAIEAHPDHAFYNLNVDAGGMWARRVIDRLIAREQRAGDLSLRMVG

SEQ ID NO: 52589 - protein, 700 aa, Ustilago maydis 521
MSSPLSQSKLRSGQQSAADNTIFSYDDDHASHSPTQPLTPSAGDTELPSYSNAAASTRTPLPLKSTTSSKEAQFEADSDDIDEEDDVVAIQASHIGLRSNDDPMYTSVASSSTNYAHRRSDAAPSLIDRIPGPSRIRASLDGLGHDIRSIRQSLGVPGWDGEGIPDWLKRGAGVFDATVNMANSILGAGIVGLPYSMRESGFVAGLVLLVGLSFLTDWTIRLIVLNAKLSGRITYIEIMEHCFGQNGKAAVSIFQFAFGFGGMCAFCVVIGDTIPHVIKMIFPSLSGSFLANRQFVITFFTLAISYPLSLYRNIEKLSKASAIALVSMVVIIVAVTIRGPAMPAELKGDPSLRFTIVNVSNLVRSISVISFAFVCHHNSLLIYGSLKEPSMNKFGQVTHYSTIIAAAATITMSVAGYWSFEEKTLSNVLNNFPNDDVIVNIARGLFGLNMLTTLPLECFVCREVLETYFFAGEFDRNRHLIFTSSLVVTAMIISLLTCDLGIVLELTGGLSATALAFIFPSLCYLKLTSETGKRVPTADLPHLTSSSWRDHGVSSGNSSSNANHQHGTQQGGHEHEALIDHPNVSIERGQDPIRANQYDDEAEEEPSTHDRLERMEGGRLAGPGLDSTIRESVDVDEVELPLRPGASVRFRPAAANRKWWQSTRPLSVACAFFGSIVLVISVWTAISDTASGKTGAVHQC

SEQ ID NO: 52590 - protein, 1216 aa, Ustilago maydis
MPTTVPSTVASANAVSSIQSQKKFSTFAGLRDMSARGGSYNGTTGQPNSNRTSIRGLFDEDGNPGSLNASPRLPTTELNSTLTDPASAAALGRSADGPWSISVAEAKDKREGRKRKQLVASYTLYVTTPTHNLTLIRSANDITEVDQKIRDALPSSRLPALPTMPNFAPSSSGRKFFQTLSRTLSPGASKSRSTFSNLIGDPATSAADLDASGAVSPPPSAPLSPVPGVNTKLASHSITTQLATYFTALANNPATREHKAWKRFVRVEADDFQSVRVERRVRKVRSDLAEHVKSSGHRATPMSGVAPAQSDLEEDGGPTEDDLDLDSADDSSRASGTPAGRISRATVVSRSGSLDTTSSDRRGVADDSRSTNTNIEMIPEEQHGEDFHEASTDRQGDAAKLHHNRSHRRRKGSNKVTVDDFEMIRVLGKGCAGKVLLVRHTSSRGLYAMKSIHKRHVLAHQELQHTLTEQAVLKRMAKDVLDPFVVRLWWSFHDRNNLYLVMDFHPGGDLATQLSRWGRLGRDRARFYAAEIVEGVEGLHKAGVIYRDLKPENVLIGADGHIVLSDFGLSKEFSSRSRSVGSITPPPTSPGRSHSSTSVNKQRSTHWMSASDDAADGSSRSSSSRWLDERETTTTFCGTAEYLAPEVLQGQAYSYEVDWWSFGTMLYEMLTGITPFWADTHADMYAKVLRDPLVFPEDRVLDQDTKSILRGLLQRNPQLRMKEPRIKKHPYFSMIEWDHIFHKRYIPPYIPPIDPDNEIDTQNFDETFLEMQPTVAHEQDVSVDMTSAAGEDVVGGTGFTHTANDPLKRTAGAAAAATPDQSMDDREASQHSNLFDGYSFRGRKDSGSIISSLSSDQLEEDVGNAALSASPVKKVAANGVKHQPKQLSPAPTVAKVSTAPVAAQATELQSQSQSASTQHPVVDASIIEEEEEEDDETAARNAAAVLAQLEQEANMEASSVAGTSATDGLIGDGMQPHSRDCTTTNSDSQSDRSVSQIQSSPASSYASRSAAPRKTVPSAVGRPSHGAIHEDDGEDDDWDMVELSGPDGALKSELNGGRGTNLFARGDWTPRGVVDTYRLLRRQESSRIPASSSHSSTSSRPFNRLGKRRNGQGLASMRSKASMGELPTANSLNTVTPTDAIPLNGDAEKEAAVEQAAAKLSATGGRASVLSASSHTELNRRSAASPSLSGSEENKHQARLKKIKRFTTFFENSSHR

SEQ ID NO: 52591 - protein, 262 aa, Oryza sativa
VLTWNDGFYNGEIKTRKIENNLVTELTAEQLLLQRSEQLRELYNSLLSGESADQQRRRPVTALSPEDLGNVEWYYVVCMTYAFRPGQCVPGKSFASNGCAWLCNAQSADSKAFPRKLLAKNASIQTIVCVPFMTGVLELGTTDPAAVARGEAAAAGRMSPILRQIWREGRDSEDSVYELINHVFPSLHDKNNANFASYMSTHAILSTKNDYVDKLNANMIDRFSRHAKVYHSFDSVDDDPHNSYHLDFLNSITLQMVSHHTS

SEQ ID NO: 52592 - protein, 296 aa, Staphylococcus aureus subsp. aureus MRSA252
MKIVIIGGFLGGGKTTVLNHLLAESLKESLKPAVIMNEFGKMSVDGALVSEDIPLSELTEGCICCAMKADVSEQLHQLYLKEQPDIVFIECSGIAEPVSVLDACLTPILAPFTTITHMIGVVDASMYKHIKSFPKDIQGLFYEQLAYCSVLFVNKIDSADVETTSKLLKDLEVINPEADIQVGMHGSVTLPISVSQMTATSDNKHESLHKTINHQFVQSPAKCTKAQFIKRLACLPTHIYRLKGFMTFEDTAHTYLIQFTQGQYELTPVAFSKKVPEYLVLIGKGISKEDYQCLEQ

SEQ ID NO: 52593 - protein, 402 aa, Xanthomonas campestris pv. campestris str. ATCC 33913
MSEVYLVDGIRTPIGRYGGALSSVRADDLGAVPIAALLARHPQLDPAAIDDVYLGCANQAGEDNRNVARMSVLLAGLPSSVPGSTVNRLCGSGLEAVGIAARGIRAGELELALAGGVESMSRAPWVMGKAESAFARNQHLHDTTMGWRFINPRLEATYGVELMGETAENVAQRYAISRDDQDAFALRSQQRTAAAQAAGFFDDEITAVAVAGRKGGERVQVMRDEHPRADASAEALARLKPVFRQPGTVTAGNAAGLNDGAASLLLASARALHLHGLTPRARVLGFASAGVEPTYMGIGPIPATQRLLARLGLQIAQFDAIEFNEAFAAQALACTRAFGLADDAAHVNANGGAIALGHPLGMSGARLALTLLRQLDACNGRRGLASMCIGVGQGVALAIERV

SEQ ID NO: 52594 - protein, 598 aa, Botryotinia fuckeliana
MMTDEKLPPTTSASISSSSTTHEKSDAEQATLAREAMKTDAELSEKPLGKTPSVHDGDNDNPIELKKTKSAADIQQEELNRVHTSAEGVEYPTGVKLQLISLALCLSVFLMALDNSIIATAIPKITDQFHSLNDVGWYGSAYLLTTASFQLLFGKFYSYFSIKWVYLVAIAIFELGSLICGVAPNSIALIIGRAIAGLGSAGIFSGALIIVAYSVPLVKRPMYTGLIGAMYGIASVAGPLLGGVFTDKATWRWCFLINLPIGAVTVLVILIFFKAPDREAVAVLPWSERIKEFDLLGTAFFIPAIICLLLALQWGGTKYPWGNGRIIALFVLFGVLIGIFIAIQFWKGDSATVPPSIMKKRSMWSAAWFSFCLGSYFLLLIYYLPIWFQAVKGDSAVKSGISNIPMVLTLVIVSIISGALVTTIGYYAPLMIVSSVIASIGIGLLTTFKPDTNHAAWIGYQCLAGIGIGFGMQQPLIACQTVLDISQVPTGTSVIIFVQTLGGALFVSIGQNVFTNKLAQNLAHYVPDLNPAVVLTTGATSIQKDIAPEYLAGVTISYNNALTQSFLVAAVMAALTIIGSVFIEWKSVKGKKIEMAAA

SEQ ID NO: 52595 - protein, 301 aa, Zea mays
  misc_feature (42)..(42): Xaa can be any naturally occurring amino acid
  unsure (1)..(301): unsure at all Xaa locations
MGNASGREEDAAAVDGDGADVEDGGGDSSVRSSERGFPPYGXGGANHVQRACSVGVVGGGGGAGSPPGSPGHSLSPRMFVPQTPVPPLQRAADVTPVFNQILMNDQEEEYDGPPQKEIPSLIVWTLGGKNVYVEGSWDNWKSRKAMQKSGKDHSLLLVLPSGVYRYRFVVDGERRCLPDLPCETDAMGNAVNLLDVNDFVPESVESVVEFEPPLSPDSSYSFQAPEDKDFAKEPPALPAQLHLGVLNSQNSEESCARPQHIVLNHLFIEKGWGAHPLVALGLTHRFESKYVTLVLYKPIER

SEQ ID NO: 52596 - protein, 338 aa, Bartonella rattimassiliensis
TASCESKITYIDGDKGILLYRGYPIDQLAEKGDFLESCYLLLYGELPTQQEKSDFDQCIMQHTMVHEQFARFFHGFRRDSHPMAVMVSCLGAMSAFYHDSIDITDPQQRMIASIRLISKVPTLAAMAYKYSIGQPFVYPRNDLSYAANFLRMCFAVPCEEYKTNPVLARAMDQIFILHADHEQNASTSTVRLAGSSGANPFACIAAGVACLWGPAHGGANEACLKMLQEIGSIKRIPEFIARAKDKNDPFRLIGFGHRVYKNYDPRAKIMQKTCHKVLKELNIQDDPLLDIAIELEKIALSDEYFIEKKLYPNVDFYSGIILKALGFPTEMFTVLFAL

SEQ ID NO: 52597 - protein, 441 aa, Ralstonia metallidurans CH34
MTHVFHRNPKQTLPVAVGGQGIELIDSNGRRYLDASGGAAVSCLGHGHPRVIEAIKAQVDTIAYAHTSFFTTEVSETLAQTLADAAPGDLDHVYFVSGGSEAVEAALKLARQYFVEIGQTQRRHFIARRQSYHGNTLGALAIGGNAWRREPFLPLLVPAHHVSPCYAYRDQAAGEADTQYAQRLADELEAKILELGPDSVAGFVAETVVGATAGAVPPVADYLKRIRAVCDKYGVLLILDEVMSGMGRTGYLFACEEDGVVPDIVTIAKGLGAGYQPIGAMLSTSRIYDAIIGGSGFFQHGHTYIGHATACAAALAVQRTIVEDKLLDNVLARGEQLRARLRESLGDHPNLGDVRGRGLFVGVEFVADRATKATLDPAKKTHAVLKRTCMEHGVLVYPMGGTVDGIHGDHVLFAPPFICTPTDIDNIVDRFTQAVKTVLPA

SEQ ID NO: 52598 - protein, 351 aa, GIBBERELLA ZEAE PH-1
MFESFQQGPPDPMFFLKKAADQDPSPEKTDLGVGIYRNESGHYSELQAVAQAKLLLAENDPGHDYELTTGNEQFLNHAAHLMFGKECQRLKSGHVASVQTISGTGANHIAALALSQSISPRPQVYLGTPTWGNYKPIFELVGMEVIEYAYLDSKTRRIDFASILSAANSAPSRSVFILQACCHNPTGADLTKEQWQKLALVMKQHDHFAFFDIAYQGLGNGIVEDVYAIRLFADLGFEMFVCQSFSKNFALYGERCGVLHAVCPNPETAAIVHDRLRCLIRWEFSSSPAYGSRLVSIILESDHLRDEWLQELSEMQQRLKSLRKQLHYHLVEVFKTPGEWDHILMENGLFS

SEQ ID NO: 52599 - protein, 334 aa, Bartonella rattimassiliensis
TASCESKITYIDGDKGILLYRGYPIDQLAEKGDFLESCYLLLYGELPTQQEKSDFDQCIMQHTMVHEQFARFFHGFRRDSHPMAVMVSCLGAMSAFYHDSIDITDPQQRMIASIRLISKVPTLAAMAYKYSIGQPFVYPRNDLSYAANFLRMCFAVPCEEYKTNPVLARAMDQIFILHADHEQNASTSTVRLAGSSGANPFACIAAGVACLWGPAHGGANEACLKMLQEIGSIKRIPEFIARAKDKNDPFRLIGFGHRVYKNYDPRAKIMQKTCHKVLKELNIQDDPLLDIAIELEKIALSDKYFIEKKLYPNVDFYSGIILKALGFPTEMFTV

SEQ ID NO: 52600 - protein, 280 aa, Rubrobacter xylanophilus DSM 9941
MSEKTVAGGRTAFGFLRMNEREGKPRSRGVTEIRGPYYSAMGKRHLADVFETMGEYVDSVKFAGGAFTLMPEEALREIIDLAHEHDVMVSTGGFMETVLTQGPEAVDRYIRTCKDVGFDIIEISGGFITIPTDDWLRLVERVQRAGLKAKPEVGIQFGAGGTTAAEELETEGTRDPGWMISQARRFIEAGAYMVMIESEGITESVREWRTDVPAEVINALGLEKVMFEAAEPEVFEWYVKNYGPEVNLFVDHSQIVQLECLRRGIWGTKSTWGRVLTYKG

SEQ ID NO: 52601 - protein, 433 aa, Magnetococcus sp. MC-1
MDQRGGTMSRSASLFQQAAGLIPGGVNSPVRAFKSVGGIPPFIREAAGAMMTDEDGKSYIDYVGSWGPMILGHAPKEVVAAIQQAAVRGCSFGAPTSNEILLAQKLIELVPSLEMVRLVNSGTEATMSALRLARAATGRDAILKFDGCYHGHADSLLVAAGSGLATFGVPSSPGVTRGTAKDTLTVPFNDLAAVEACFAQHPEGIAAVIVEPVAGNMGCVLPRPGYLKGLRDICTKYGTILIFDEVMTGFRVDLRCAQGFYDVTPDLTCLGKVIGGGLPVGAYGGKMELMNQVSPAGPVYQAGTLSGNPLATAAGLATLEAISQPGFYETLTSRTQRLTVGIGKALDEAGIPHVSYHIGSMFGLFFTDAREVYNFADAAKNDHNRFKDWFHCMLEEGVYFAPSPYEAGFVSIAHDEAIIDLTIEKARKVAKTL

SEQ ID NO: 52602 - protein, 485 aa, Arabidopsis thaliana
MDVSKVTTSDGGGDSMETKPSPQPQPAAILSSNAPPPFLSKTYDMVDDHNTDSIVSWSANNNSFIVWKPPEFARDLLPKNFKHNNFSSFVRQLNTYGFRKVDPDRWEFANEGFLRGQKHLLQSITRRKPAHGQGQGHQRSQHSNGQNSSVSACVEVGKFGLEEEVERLKRDKNVLMQELVRLRQQQQSTDNQLQTMVQRLQGMENRQQQLMSFLAKAVQSPHFLSQFLQQQNQQNESNRRISDTSKKRRFKRDGIVRNNDSATPDGQIVKYQPPMHEQAKAMFKQLMKMEPYKTGDDGFLLGNGTSTTEGTEMETSSNQVSGITLKEMPTASEIQSSSPIETTPENVSAASEATENCIPSPDDLTLPDFTHMLPENNSEKPPESFMEPNLGGSSPLLDPDLLIDDSLSFDIDDFPMDSDIDPVDYGLLERLLMSSPVPDNMDSTPVDNETEQEQNGWDKTKHMDNLTQQMGLLSPETLDLSRQNP

SEQ ID NO: 52603 - protein, 424 aa, Pseudomonas fluorescens PfO-1
MQQEFNDPLWRTVLSGAQMLFVAFGALVLMPLITGLDPNVALFTAGLGTILFQIVTGRQVPVFLASSFAFITPIILAKGQFGLAATMGGVMAAGFVYTFLGLAVKIKGTGFIDRLLPPVVIGPVIISIGLAMAPIAANMAMGKAGDGSELIHYQTAMMISMPALLTTLIVAVFGKGIFRLVPIISGVLVGFAMSFYFGVVDTAKIAAAPWFALPHFTAPEFNWQAILFIVPVALAPAIEHIGGVIAVGSVTGRDYLKKPGLHRTLLGDGIATTAAGLFGGPPNTTYAEVTGAVMLTKNYNPKIMTWAAIFAISLAFIGKFGALLQSIPVPVMGGILCLLFGSIAAVGMNTLIRHKIDLGEARNLVIVSVTLVFGIGGVLVGTGTGPDDFGLKGIALCAVVAIALNLLLPGNDSWKQKKADEPLI

SEQ ID NO: 52604 - protein, 1566 aa, Ustilago maydis
MSAATPTSPGFPLTMGTGVMAAHFAAPSSNAGSPRSRPTTPLSAGLTPSGPTYDDLGRWDDADVASWLNAARLGHYASIFAEHDIRGSVILDVDQAALKEMGITMVKDRVRISAAIKLLNKRCADSAVARRPSVVSISPLLPLASHPLYAHEGEIEYLQHDHTADPSADGSGSNFGLNSMGMRRGQMRPPPLTLKQSTSRGMPGYASPAGSINQSQGFGLSAARGLTPGAARGSVWNTASSSSATSKPGTPDGALHRKVNSIGGVAAPLAVGASSSLSSSRHPYGHAVHSNRPSTATGASGYSNVPASQSLRSNHTSSSPTATSFGSNINAASARPSTATGAQSYTTNVPGTSSARDGYSPLTPISESNSLGNTPTTPSGIQQQQQSAGYAVGRGPFASSQRYAASSVPSQQQPSSGHTLRHVDSGEGYNLAGYQNPNPPTLEDLKRRTIKFISEEDNTTRIVNVSDCRDAYDVMARVLKKFGKPPSGNSYTPTADQGPTGDELGATETWGIFATSADGQNTKALSDNELLAICHAPQPHDPLRERGLTLRRIPNHLPGEDARKVPVRSGRNKLEAFFGERMPVAQMQPAGPGSGVNADEEDAGSVTISGKKMKRASTVSIMSGLGVGPFSSSSHNTGAGHTHGSTRAEGKLLSKKESKHMSPPPVTSKPSKIRNFFGQRPPSELINTNLADFFPSTDSKALQRTARRSIYGRASASTRSKRNSTWSFVADPDAPPLPNKGSMDGHPTPLERSSISIRERGTTPVIQIGYDSRSEDDHQSNARRTSSGTHSHLHPSLTGPPTLPPVVSRDSLDEWSRDLKAVGSPVTEENAMFQSSRHGHASGSQQHHAAMKHYPSHASGYADRPSISRRASGESARSRRSLASQVRHGLSAARERNADTASLLTVDEITQEVENRRESISLAGAGGGWVVDEDGVPIPIPGSSSPFSSSAAASTRPSSGISSSYVHNGHLEHDDSEGHSDEEANQSSDLEEATRTRKARGVPSKAASIRTVASKRASSVLQAPGDESDRHLGDPMAVARSTTSRASSVSELRRSVHDHGDPSDGESGSDFTDSDLDSDGSETDEDEQANDVYLPSAKPAPIKWHKGALIGAGSFGNVFLGMNAKTGLLMAVKQVELPSGDSHLDQRKKGMLEALEREIKLLKSLEHENIVQYLDSFADDSHLNIFLEYVPGGSIVALLRNYGAFEEPLVRNFVRQILNGLSFLHNRGIMHRDIKGANILVDNKGGIKISDFGISKKVESDLVLATNKGGAGGGGAGGAAHRPSLQGSVFWMAPEVVKQTSYTIKADIWSLGCLVVEMISGTHPWAELNQMQALFQIGMGRKPSLPDEISNECRDFLEKTFELDYNNRPSADELLNHAFMGTEMTFPPSSGADGSGGGDDDAGGSGDAGDGDASTMGMTNDAETGTTRETRETKDGKRPTRSKSTRRLEREKRHKEAAAAAAAATALDTGTPNTPTSHTAAAAAAAAAASASASASASPAVASTSPAPGDAETGSPTNGKSAVPPAGSTGGTPESILTVSIATARGNSTSTALSAADAAFSEEADS

SEQ ID NO: 52605 - protein, 522 aa, Triticum aestivum
  misc_feature (219)..(219): Xaa can be any naturally occurring amino acid
  misc_feature (264)..(264): Xaa can be any naturally occurring amino acid
  misc_feature (285)..(285): Xaa can be any naturally occurring amino acid
  misc_feature (308)..(308): Xaa can be any naturally occurring amino acid
  misc_feature (333)..(333): Xaa can be any naturally occurring amino acid
  unsure (1)..(522): unsure at all Xaa locations
MAMVDEPLYPIAVLIDELKNEDIQLRLNSIRRLSTIARALGEERTRKELIPFLSENNDDEDEVLLAMAEELGVFIPYVGGVEHAHVLLPPLETLSTVEETCVRDKAVESLCRIGAQMKKNDIVDYFIAVVKRLAAGEWFTARVSSCGLFHIAYPSATDPLKTELRTIYGQLCQDDMPMVRRAAASNLGKFAATVEQSHLKTEIMSIFDDLTQDDQDSVXLLAVEGCAALGKLLEPQDCVAHILPVIVNFSQDKSWRVRYMVQPXYELCEAVGPEPTRADLVPAYXSLLRDNEAEVRIAAAEKSIKLEXGAKQARGHFLPGVKELSSDSSQHVXSALASGFMGMAPVLGKDATIEQLLPIFLSLLKDEFPDVRLNIISKLDQVNQVIGIDLLSQSLLPAIVELAEDRHWRVRLAIIEYIPLLASQLGVGFFDDKLGALCMQWLEDKVFSIREAAANNLKRLAEEFGPEWAMQHIIPQVLEKINNPHYLYRMTILQAISLLAPVMGAEITCQKLESEEQQWQWQ

SEQ ID NO: 52606 - protein, 365 aa, Arabidopsis thaliana
MLAGLAFKRKWQNKRKAEGKPYDKPNIVTGANVQVCWEKFARYFEVELKEVNLSEGYYVMDPDKAAEMVDENTICVAAILGSTLNGEFEDVKRLNDLLVKKNEETGWNTPIHVDAASGGFIAPFIYPELEWDFRLPLVKSINVSGHKYGLVYAGIGWVVWRAAEDLPEELIFHINYLGADQPTFTLNFSKGSSQIIAQYYQLIRLGFEGYKNVMENCIENMVVLKEGIEKTERFNIVSKDQGVPVVAFSLKDHSFHNEFEISEMLRRFGWIVPAYTMPADAQHITVLRVVIREDFSRTLAERLVADISKVLHELDTLPSKISKKMGIEGIAENVKEKKMEKEILMEVIVGWRKFVKERKKMNGVC

SEQ ID NO: 52607 - protein, 148 aa, Oceanobacillus iheyensis HTE831
MEKTFLMVKPDGVQRELIGEIVKRFETKGYKLAGAKLMQVSNQLAETHYSEHKERPFFGELVDFITSGPVFAMVWEGENVIATARKMMGKTNPLEADPSTIRGDFGISVGKNIIHGSDSAESAEREITLFFTENEIVSYEKQANNWIY

SEQ ID NO: 52608 - protein, 459 aa, ASPERGILLUS NIDULANS FGSC A4
MAPFSKSIPIAIIGDGAFGLSTALHLVQNGYTDITVLEQDEKIPPPYSAANYLNKIVREEYEDPFYTNLTVLCPMGSGYINTDKATGVSHSPFPVNQEASSGFLPAEDETRIRKLLQQTLPALANRPLVLKSLCWFADTKDSDFIIDFVPGSKGSVVIESADSGHGFKMFPIVGSWTSLLSKRHTPNSIHSGKPNLRANMGQSTYRGNYGLPWVLPSVQQARRGFNEKGLVHEYLPILRLKGLREGAARYCTLREKGGAADADAASDAVAARKVYIPSTTWSNHRLLFSSLGFTVGQFNYYNNATRSLNIDSYLAALRSADHGSVVLLHACAHNPTSLDPYIEQWKQIWDIIKERRLFPIFDAAYLGLNSGDYDKDAWAIRGRLTEPGEGVGRIILQPTPFSQSVLESLQRSEISNLPAFRAKIAEAIMSDDMLKNVWLEDLKTMSGRIAEMRRAFSTG

SEQ ID NO: 52609 - protein, 328 aa, Bacillus cereus E33L
MKAIVVTSFGGPEVMKYTDVDIPAISEDQVLIRVVATSANFADIKSRYGKKGNKALPFIPGIDAAGIVERVGSHVKNIYPGQRVIAFPQNGSYAEYVVANENLTFALPDEVDFQTAAACPIVSFTSYNLLANVARLQQGESVLIHAAAGGIGTTAIQLAKLLGAGTVIGTVGSEAKKEIALDAGADYVIGHQDEDFVEKVNELTNGEGVDVILDSISGTVSERSLKCLAYYGRLIHFGNASGEIGNFQTKDLHASCRSILGFSFGTTRKKRPELLQKTANEVFRYLRDGRLQIKATKSFPLQDAGKAHEWVESRKSTGKVILTVQSSS

SEQ ID NO: 52610 - protein, 488 aa, Pseudomonas fluorescens PfO-1
MIQTETDMQLIWLRSDLRQHDNTALAAAAERGPSVAVYLLSPQQWQEHDDAPCKIDFWLRNLHKLSKSLGDLNIPLLIRTAPHWDQAPAVLLELCRQLKIEAVHVNEEYGINESRRDAAVAKALQAEGITFHSYLDQLLFKPGSVLTRTGTYFQVFSQFRKVCYEHLHRSMPSLKQAPGKQSALNIASDPVPEAIEGFPTPGASLRALWPAGETEARRRLDTFADAQIDYYKSERDFPAKPGTSQLSAYLAAGVISPRQCLHAALQSNQGEFESGKVGAVTWINELLWREFYKHILVGYPRVSRHRAFRPETEDLAWRNAPEDLAAWQEARTGLPIIDAAMRQLLETGWMHNRLRMVVAMFLTKNLLIDWREGERFFMRHLIDGDLAANNGGWQWSASTGTDSAPYFRIFNPVSQSEKFDSEGLFIKHWLPELAGLNKKEIHNPASVGGLFGVADYPAPIVNLSASRERALAAFKNLPSRSSQGESDE

SEQ ID NO: 52611 - protein, 123 aa, Salmonella enterica
CIIWGLGISLAVYLTAGISGGHLNPAVTIALWLFACFPKQKVLPYIIAQFAGAFGGALLAYVLYSSLFTEFETAHHMVRGSVESLQLASIFSTYPAAALNVWQAALVEVVITSILMGMIMALT

SEQ ID NO: 52612 - protein, 220 aa, Pseudomonas aeruginosa UCBPP-PA14
MTTRTLNLDDNLYRYLLDVSLRETPLMTRLREETAKLPNARWQIAPEQGQFIALLLTLIGARRALEVGTFTGYSALCMATALGEQGRLTCCDLPGDYHLTARRYWREAAVEERIELRLGPALETLRALLDEGLAGQFDLAFIDADKANYPEYLEAALALVRQGGLVLFDNVLWSGRVLEAQPKSADTRGIQQLNLALKNDARVDYSLLPIGDGLSVCRKR

SEQ ID NO: 52613 - protein, 816 aa, Nostoc punctiforme PCC 73102
MQTSSSSGVAMSELLQAVLDSEERSDLRSFLSELRQQEKKYLLRNDILNVYSEYCSKSQKPEAYYTTSELGKLIYYTQEIIQEDSNFCFIIRSKIASQEVYWLTSDLSIEPMTVQDLLDLRDRLVNKFHPNDGDLLELDFGPFYDYTPIIRDPKNIGKGVQFLNRYLSSKIFQDSKQLLENLLNFLRLHHYNGVQLLVNDRIQSQQQLSEQVKKAIGFVNNRPDDEPYEQFRFQLQSMGFEPGWGNTAARVRETLNILDELIDSADPQTLEAFISRVPMIFRIVLVSAHGWFGQEGVLGRPDTGGQVVYVLDQAKSLEKQLQEDVLLAGLEKLNVEPKVIILTRLIPNSDGTLCNQRLEKVHGTENAWILRVPLRDFNPNMTQNWISRFEFWPYLETFAIDSERELRAEFQGTPDLIVGNYTDGNLIAFLLARRLKVTQCNVAHALEKSKYLFSNLYWQELEEKYHFSLQFTADLIAMNAANFVVSSTYQEIVGTPDSVGQYESYKCFTMPELYHVTNGIELFSPKFNVVPPGVNENNYFPYTRTKDRVESDRQRLAETLFTLEDPTQIFGKLDDPNKRPLFSMARLDHIKNLTGLAECYGQSKELQEHCNLILVAGKLRVEESGDNEERDEIIKLYNIIDEYNLHGKIRWLGVRLSKTDSGEIYRVIADRQGIFVQPALFEAFGLTILESMVSGLPTFATQFGGPLEIIQDKVNGFLINPTNLDETATKIVDFITKCEQNPNYWNEISQRGIDRVYSTYTWKIHTSKLLSLARIYGFWNFTSKENREDLLRYLEALFYLIYKPRAQQLLEQHKYR

SEQ ID NO: 52614 - protein, 262 aa, Salmonella enterica subsp. enterica serovar Paratyphi A str.
MFVAAGQFVVSSVWEENAQVCVSLMAQAADRGVSLLVLPEGILARDDIGLDLPIRAAQPLDGAFMTRLQEESAHNNMTTIFTILVPSTPGRAVNMLVALRAGHIVARYAKLHLYDAFSMQESQSIDAGTVIAPVLDVEGVKVGLMTCYDLRFPDMALVLVLQGADVLALPTGWVRGPLKEQQWSTLLAARALDTTCYMIAAGECGNRNIGQSRIIDPLGVTIAAAADRPALIVAEIFRERIDQVREQLPLLQQRRFAPPQLL

SEQ ID NO: 52615 - protein, 390 aa, Vibrio vulnificus YJ016
MFSINSIEVVMKKLSKLLISAAIALPLMFTLLAKVGVADTIDKTAPNLASLPVATLAGGCFWCTESDLEKLNGVYDVVSGYSGGEMANPTYRQVSSGKTGHIEVIQFRYDPNVVSYEAVLDYFLRHIDPTDDKGSFVDRGPQYRPAIFYHTAEQKQIAERFLKEVDEAKIYPKPIKTELIEYTAFYPAEQYHQDYYKKSSLKYKYYRHASGRDQYLDKVFGDDRIEQPKTLRQLIDEKALTKNAKTYSRPSDKEIKAQLTDLQYYVTQKEGTERPFNNEYWDNKEAGIYVDIVSGEPLFSSTDKYKSGTGWPSFTKPISSAYIVTKTDYKLLYPRTEVRSKFADSHLGHVFDDGPAPTGLRYCMNSAAMKFVPVAQMEKMGYGEYLTLFQ

SEQ ID NO: 52616 - protein, 414 aa, Schizosaccharomyces pombe
MGQTLSEPVTEKHSVNGSNEFVLYGLSSMQGWRISMEDAHSAILSMECSAVKDPVDFFAVYDGHGGDKVAKWCGSNLPQILEKNPDFQKGDFVNALKSSFLNADKAILDDDQFHTDPSGCTATVVLRVGNKLYCANAGDSRTVLGSKGIAKPLSADHKPSNEAEKARICAAGGFVDFGRVNGNLALSRAIGDFEFKNSNLEPEKQIVTALPDVVVHEITDDDEFVVLACDGIWDCKTSQQVIEFVRRGIVAGTSLEKIAENLMDNCIASDTETTGLGCDNMTVCIVALLQENDKSAWYKKIADRVAANDGPCAPPEYAENHGPGWRSGDNNKKVIVPPNFHQVKLNGSDGYDKDANENSKEDDSTNGSLAAGFRWKEHFFPHKAEEENSSSETDIVNSNKDVADDHKEAVSAAD

SEQ ID NO: 52617 - protein, 182 aa, Triticum aestivum
MSHQTRQEQDTTVAYFQVADLAHTSTKVTPTMSIVRRSSVFDPFADLWADPFDTFRSIIPAISGGNSETAAFANARMDWKETPEAHVFKADLPGVKKEEVKVEVEDGNVLVVSGERTKEKEDKNDKWHRVERSSGKFVRRFRLPEDAKVEEVKAGLENGVLTVTVPKAQVKKPEVKAIQISG

SEQ ID NO: 52618 - protein, 167 aa, Salmonella enterica
AGASLGLWEICIIWGLGISLAVYLTAGISGGHLNPAVTIALWLFACFPKQKVLPYIIAQFAGAFGGALLAYVLYSSLFTEFETAHHMVRGSVESLQLASIFSTYPAAALNVWQAALVEVVITSILMGMIMALTDDGNGIPKGPLAPLLIGILVAVIGASTGPLTGFA

SEQ ID NO: 52619 - protein, 487 aa, Vibrio vulnificus CMCP6
MSKEIKAQVVVLGAGPAGYSAAFRCADLGLDTVLIERYNTLGGVCLNVGCIPSKALLHVAKVIEEAKALAEHGIVFGEPQTDIDKIRLWKEKVINQLTGGLGGMAKMRKVNVVNGFGKFTGPNTIEVEGEDGKTVVNFDNAIVAAGSRPIKLPFIPHEDPRIWDSTDALELKEVPGKLLIMGGGIIGLEMGTVYHSLGSQIDVVEMFDQVIPAADKDIVKVYTKRISKKFNLMLETKVTAVEAKEDGIYVSMEGKKAPAEAERYDAVLVAIGRVPNGKLIDGEKAGLEIDERGFINVDKQMRTNVPHIFAIGDIVGQPMLAHKGVHEGHVAAEVISGKKHYFDPKVIPSIAYTEPEVAWVGKTEKEAKAEGINYEVATFPWAASGRAIASDCADGMTKLIFDKETHRVIGGAIVGTNGGELLGEIGLAIEMGCDAEDIALTIHAHPTLHESVGLAAEVFEGTITYLPNAKAKKKKIIFLASRQNKNR

SEQ ID NO: 52620 - protein, 536 aa, Magnaporthe grisea 70-15
MASNPDPGVLSPQEAIHASTQATSTVAASTVAASTQAPSPDLPISQPQPQPQQPSPPLPTSPSQLEQAHAFAEPEVPPPLLPTPKSATFARSTQGGSSRRRRRSRSRNRAGTATSANNPYFPGDQASTRRLRYSIDEYEDEGLRNEIGRHPDGRSMPRARPPRAYLNHPAYANLDSPAKPYTEDPKGHREFDYEVDPNTRQQYEEEYAYGTGVSHGPGMAGPQPFMRFGPTSNASHYGPDSQAPRINWKDLSREERTEVLRLPWTQWMNSNVKNHFVAMLGELIGTTMFLFFAFAGVEVANIGLPSSAPFNLAKQLYISLSFGFSLMVNVWIFFRISGAQFNPAVTLALWMTGAVDAVRGVCLVISQLCGGMLASVIVRFLFPQRFSVRTSLSQNTSLVQGVFIEALLTSELVFTILMLAKEKHKATYMAPVGIGLALWIDHMVGVPFTGAGINPARSFGPCVVTATFEPEHWIYWVGPGIGALIAVAFYKLIKVLEYEMANPGADGDADNDPTQNPAKRAELAAGRRFAGGFDAK

SEQ ID NO: 52621 - protein, 291 aa, Magnaporthe grisea 70-15
MAIIENWIPPTRENWETLLFVWKFFPILPSVQWLTPWYPMGKTSYPSIFNVPGRLAWFLMEIPGVSILLYNMSTLPAKHGIDDLPWQNKVLAGLFAIHYSYRAVMYPLMAPSMAPMNIVVASSAVFFQVMNGTCLGAWLAAYGPTTQEEWRAQLGAGGTLQFVVGISIFYLGLAANYYHDDELREIRRREERRRERVARDEGVRPETVERHYAIPQAGFFKFVLYPHYFLEWCEWFGYWMACGWSCTPAFLFLFNEFVSMLPRAVNGRKWYEERFGPEKIKGRKAVIPGLL

SEQ ID NO: 52622 - protein, 115 aa, Arabidopsis thaliana
MDPYKYRPSSAYNAPFYTTNGGAPVSNNISSLTIGERGPVLLEDYHLIEKVANFTRERIPERVVHARGISAKGFFEVTHDISNLTCADFVRAPGVQTPVIVRFSTVVHERASPET

SEQ ID NO: 52623 - protein, 643 aa, Desulfovibrio gigas
MCGIAGFVLLQDAPPVTDHQARDVLAAMAGRIAHRGPDGRGHHVGLPAAFAHCRLAIIDLSTGAQPMAAEDGAAVVTFNGEIYNYQEVRRELQALGRTFQTRSDTEVLLQAYLEWGVACLDRLEGMFAFALWDVRRRTLFAARDRFGKKPFFYTIQQGVFAFASELSALEAVPWAAFSIRASTLARFLAYEYVPTPESIYAEARKLPPAQYLELHEDGTLLVERYWETPMPRPEGSKGFGRADEPALCEELRRLLTQAVRRRLIADVPVGVFLSGGVDSSSVAAMAGQLAPGIKTFSIGFTEASYDESAYAGRVAAQLGTDHQLELLSADACADLLPEVVSRFDEPMADPSIVPTYLLSQITRRQVTVALGGDGPDELLAGYEYYPGFKATQYWERLPAWLRRAAVAASGLLPGSAGYVNPRHVAQTFLAAAEAPAWLRTQRMLTALTPEAQRALWKSPGDMLEPTRLFASTKRLWEALPDWPPMARVFHLFAQQITYGYILVKVDRCTMLHGLEARAPFLDRDLAEFCFRLPVSMKLRGATRKYLLKEAMAGLLPQDILHRPKRGFLIPTAAWLRGRLRPLVDDLLHERRLREQGLFHPAAVRRLVEEHASGKKDHRKGLWTMLVLQLWLAGKPAVRIDPER

SEQ ID NO: 52624 - protein, 327 aa, Ralstonia metallidurans CH34
MRRRGAAAKKPEKSAETANDNGWRTWQCQVGSCRATGAVTATVVGQRPADTFQIDVLRSCVMSSLPLIEPDTALFLDFDGTLADLAPRPELVQVEPELVGTLRALHTCLDGALAIISGRPVAELDGFLQPLRLPAAGVHGAELRHDGEALFMPPAPGITALMPRLEAFVARHPGLRIERKSVAVAIHYRQAPELEAQVRAMVADTLHDVDGLEGLPGKMVVEIKPAGVDKGGAIAAFMRMAPFEGRKPLFAGDDVTDEAGFVVARELGGVGVLVGERATAATVSVTGPAALRCWLHRSAHALLALRAQRGGKPQSVSSTSSETEDSL

SEQ ID NO: 52625 - protein, 1191 aa, Oryza sativa
SWSQTIASQSHCRPQTLHRLLIATTTTTSIIVACFALLCPALLSPSSATATASTCPPPHSSTHASPFQSAPRQACTPPDCPQDFTSLPSRASSAHPCVIANRPRRIRPTPRPRPRPRPPSITFISKGRSLRLISCPIPHRRLTTTASLSHLPQKPPTRTQASLCYINPSLHIRALRHPLGLPRSKCNLSTITDMDAFQADTTPPPTPGPSSFAPPSPHAQRLARQPPTSLSLRIPQDGQSRLTQPSPLSARPALPLSPGHASSSTLAPPPLSRLARKRPSKLTLAPPSLADDPGLSSRSMPSSPVVLSRSNSKSEHQPDSTVAAPSAISEAVRHLSSTLRGTPRRRPSMPFKDTSAQRSAFPEPPSASSSRTRPPEAFRDPSEHILSGKGSTLQHARSVYSHGPVEILPGLYLGDEHNARDHHTLSALGITTILNVAKETTLDFTADAASASPAQWSRVPERRGTLANGELPSARSHRDSAQSSQVPPTPGAYFTPPTTASLPVARDNNDAPSPRTAISPSVLRNTSSTPNLLTQFLHDEPASTSDLSSHTQAAPVDASADLRTLTAQDVLKYRTLRRSSGSSSDDANDTASSPSSSRAPSTCTSAATELTPPALMSIRAKGSDAESESHDAYDSSAYSSQQVSPRYASDAGEQQSPSAWVTHVELPANATLTRVAVGAADGCAAEVRYIKLPWTHDETELASGHGGFAQGCALIAEALGVDARYWYAAKIPEDVDACSALHDDASLAQVQTSRTPGRILVHCQCGVSRSATLVIAFVMQAAAMRYGFGAARSLLGMHDCYNMVKDKSSSISPNISLIYQLVEWERYLSSAAGRLRDVLGMASVRNHSEAGQVMDVGHSTSLAGAGWCTETMDEAMWSKMRLEEEEKEAAEEARRREERLNEAVRLAAERKAAQDRLEGLTPDSAAAVGSDAAAGSLMQRRRKKAAPALQLQTAGAAGGAGAALASPGMQRRRPPALQLSRNGADRGTAVETPFQTARMEVWTGSEHDGDGDVMMDELDAPQTPLRSWAMDSDVVSTPTARTAAGPCEGEADASTLRTPSARTHASFTLGGEARLDRARPSSTSHVSLGREGVVSSTLPLAMETSLSLGSRGVEAQGHAGRARARPDSMQSVLSSTASSTALFGVTALSREERKKQHRRTFSSDWPTLQANLASQKRRSKIEPGPTEAMDV

SEQ ID NO: 52626 - protein, 464 aa, Ralstonia metallidurans CH34
MGRLVAVSNRVADPRNHAAGGLAVALSDTLNKTGGLWFGWSGKVVDASRGGTPGEGELHQIQAGNVTLATVDLSREDFESYYLGYSNGVLWPVFHYRVDLADFDSGGNLNAYRRVNQLFARKLAPLLKPDDVIWIHDYHLIPLAAELRAIGCGQRIGFFLHIPLPPRLILATIPQHEWLMRALFAYDLLGFQSHDDVEHFSRYVQGEAGAEPMGEYRFRAFHRTVRAQAFPIGIDVDEFIELGRADEARETYEMMRGQYARRRLLLGIDRLDYSKGLPQRLKAFQTLLAEYPENRSSATLIQIAAPSRESVDAYADLRRDMEGITGAINGEYGELDWMPVRYIHRSTARRRLPGLCRACNVALVTPLRDGMNLVAKEYIAAQDPEDPGVLVLSRFAGAAEQLKEALLVNPYDTRATAQAIQQALHMSLSERQARHQKLLERIRQQDVHWWSGEYLRALMETEGG

SEQ ID NO: 52627 - protein, 439 aa, Taxus cuspidata
MEKTDLHVNLIEKVMVGPSPPLPKTTLQLSSIDNLPGVRGSIFNALLIYNASPSPTMISADPAKPIREALAKILVYYPPFAGRLRETENGDLEVECTGEGAMFLEAMADNELSVLGDFDDSNPSFQQLLFSLPLDTNFKDLSLLVVQVTRFTCGGFVVGVSFHHGVCDGRGAAQFLKGLAEMARGEVKLSLEPIWNRELVKLDDPKYLQFFHFEFLRAPSIVEKIVQTYFIIDFETINYIKQSVMEECKEFCSSFEVASAMTWIARTRAFQIPESEYVKILFGMDMRNSFNPPLPSGYYGNSIGTACAVDNVQDLLSGSLLRAIMIIKKSKVSLNDNFKSRAVVKPSELDVNMNHENVVAFADWSRLGFDEVDFGWGNAVSVSPVQQQSALAMQNYFLFLKPSKNKPDGIKILMFLPLSKMKSFKIEMEAMMKKYVAKV

SEQ ID NO: 52628 - protein, 283 aa, Arabidopsis thaliana
MERSTPVRKPHTSTADLLTWSEVPPPDSPSSASRSAVRSHQPSDGISKVVFGGQVTDEEVESLNRRKPCSEHKMKEITGSGIFSRNEKDDASEPLPVYQQAVNGISQISFGEEENLSPKKPATVPEVAKQRELSGTMENESANKLQKQLSDAKYKEISGQNIFAPPPEIKPRSGTNRALALKDNFNLGAESQSNQRNAILQTAEEDSSVKTAKKIYDKKFAELSGNDIFKGDAASSNVEKHLSQAKLKEIGGNNIFADGKVEARDYLGGVRKPPGGETSIALV

SEQ ID NO: 52629 - protein, 356 aa, SYNECHOCOCCUS SP. WH 8102
MVPPTAVAEANAVATKDPVKDTILTPRFYTTDFDDMAAMDLRPNEAELEAICEEFRKDYNRHHFVRNDDFDGAADKLDPETRRVFVEFLEQSCTSEFSGFLLYKELSRRIKQQNPLLAECFAHMARDEARHAGFLNKAMSDFGMQLDLGFLTANKDYTFFQPKFIFYATYLSEKIGYWRYIAIYRHLEKNPESKIFPIFNFFENWCQDENRHGDFFDALMKSQPDTVRGPIAKLWCRFFLLAVFATMYVRDVARKEFYEALGLDARTYDKMVIEKTNETTARVFPVVLDVNNPKFWTRLERLVENNAALEAADRSSSPAPLKLFKKLPRWISNGAEMAKLFLMSPIDSAKFQPAVR

SEQ ID NO: 52630 - protein, 287 aa, Triticum aestivum
MAVARLRSATAAAAARLQPALAGRRRLGTAAAAEAPEAVVGAGSARWEPMGAREYYDYRRAIYGDITHKAILVDAAGTLLAPTEPMAQVYRTVGEKYGVKYSEDEILMRYRQAYAQPWGRSRLRYVDDGRPFWQHIVSSSTGCSDLEYFEELYHYYTTEKAWQLIDPDAKYVFEALRRAGVRTAVVSNFDTRLRPLLQALNCDHWFDAVAVSAEVAAEKPNPTIFLKACELLDVKPEEAVHIGDDRRNDLWGARDAGCDAWLWGSDVHSFKEVAERIGVSVGMGNNM

SEQ ID NO: 52631 - protein, 272 aa, Zea mays
RGIPPDQQRLIFAGKQLEDGRTLADYNIQKESTLHLVLRLRGGMQIFVKTLTGKTITLEVESSDTIDNVKAKIQDKEGIPPDQQRLIFAGKQLEDGRTLADYNIQKESTLHLVLRLRGGMQIFVKTLTGKTITLEVESSDTIDNVKAKIQDKEGIPPDQQRLIFAGKQLEDGRTLADYNIQKESTLHLVLRLRGGMQIFVKTLTGKTITLEVESSDTIDNVKAKIQDKEGIPPDQQRLIFAGKQLEDGRTLADYNIQKESTLHLVLRLRGGQ

SEQ ID NO: 52632 - protein, 189 aa, Rubrobacter xylanophilus DSM 9941
MTDSRYGRGFTLWFTGLSGAGKTTIAEIVEKELRERRGAVEVLDGDIVRTNLSKGLGFSREDRDTNVLRIGFVANLLTRNGVAVIVSAISPYREARDKVRQMIGEDFIEVYVDAPLEVCAERDVKGLYKKALAGEIPQFTGVSDPYEPPVAPELHIRTNEERPHQSARRVIEKLEELGYLQPVREYNRA

SEQ ID NO: 52633 - protein, 870 aa, Arabidopsis thaliana
MKSSYGSSSNDLHAFVNEIKGEIQLSNINLDPYSFVSPSAYDTAWLSMIEEDINVDDNELKPMFQGCLDWIMCNQNAREGFWMNSTSYTTVADGRDEDGEKDMCILTSTLACVVALQKWNIGCFHLHKGTRYIERNTEMIIGKYINEEGSYPRWFAIKFTGILELAQKLGLHFVFSSRCIEMIKGMFYQRQEIIQREKLVHDCNYKPLLAYLEVLPSKLYVTNQEDIIVKSLDSMDGSLFQSPSATASAFMLTRNTKCLAYLQNLVQKCPNGVPQKYPLNEDLIKLSMVNLIESTGLGEFFGIEIEHVLEQVYSRYEEKDFERMPMSYLADQLHKDSLAFRMLRMHGRDVSPRSFCWFLNDQETRNHLERNIDSFLLVILSVYRATDLMFPGEHDLQEAREYTRNLLEKRRSIKEKMVPIYLNKIMHELSTPWIARLKHLDHRMWIEDKNSNVLSMEKASFLRLHSSYSDKLTHLAARNFEFQQAKYCRELEELTIEKTTYCYFATVTSLPYEYAIKFGKLAAKTAILITIADDFFDEKGSFNDLEGLTKAVLRWEGEELKSYGNIIFRALDDIVRETANTCRTHHKTDIIVHLRNIWGETFESWLREAEWSKKGHTSSMDEYIRNGMISIAAHTIALSISCLMEPCFPHNKLKPGNYDSITTLLMIIPRLLNDLQSYQKEQEQGKMNSVLLHMKNHPGLEIEDSIAHIEKIIDSKRKEFLEHVLVDGLSDLPKPCKEIHMSCCKVFEMFFNKKNRYDSNTEMLHDIKKALYDPINVYELSEMEPMPLMAHGDEYMILPLLLNSLPNILEFKRKDGYGAMKTSMCFGRSYRVNKRVMASQLDDQHKPLKIVASQRKPVPMMQSIFAPCFY

SEQ ID NO: 52634 - protein, 378 aa, ASPERGILLUS NIDULANS FGSC A4
MAIDGAYPPATLPAGDTKTESESAAITAAAHPLSALPTPVLLRSLLIATISSKPSLLIPSLSALSFLCKPRAGPLLNVDRNPILHFILKATFYRQFCAGETPDEVRSTIRQLAGMGFQGTIMTYAKESVFDAKTKMQTGLGVSTKMSGKQEVTEPTLARGEAFCPQIEAWRKETVETIELLGANDYLALKLAYLKSTPATIARHLQAASDVGFTLGLKLVRGAYIFSDERSLIHETKADTDAAYNGIAQGVLCRQLGAFGTEKPFPSVELFLASHNKESVMKAHALRLQRLKEGLPTVPVGFGQLHGISDEVSFRLLTLKNERNEPMVYKCSTWGRLSECLAYLVRRAVENRDAVGRTEDEYRALKREMARRSWYSLL

SEQ ID NO: 52635 - protein, 357 aa, Triticum aestivum
  misc_feature (253)..(253): Xaa can be any naturally occurring amino acid
  misc_feature (277)..(277): Xaa can be any naturally occurring amino acid
  misc_feature (300)..(301): Xaa can be any naturally occurring amino acid
  misc_feature (309)..(309): Xaa can be any naturally occurring amino acid
  misc_feature (316)..(316): Xaa can be any naturally occurring amino acid
  unsure (1)..(357): unsure at all Xaa locations
MEQYEVVEQIGRGAYGTAYLVHHKAEKKRYVMKKIRLTKQNDKFQRTAYQEMSLMASLSNPYIVEVKDGWVDEGTSVCIVTSYCEGGDMAQRIKKARGVLFSEERVCRWFTQLLLALDYLHCNRVLHRDLKCSNILLTKDNNIRLADFGLAKLLMEDLASSVVGTPNYMCPEILADIPYGYKSDIWSLGCCMFEILAHRSAFKATDMATLVNKINRSSISPMPPIYSSSLKQIVKSMLRKNPEHRPTAGGVLXRHPYFQPVSGLESNPTALHLPSKXTQRRVTWGDKQSKKPKWAARKRXXKATVPSEXLQAAARXTRGTKRQSDNYYGTKLHLQHGSERTRKNMFTQQGDWHNDGR

SEQ ID NO: 52636 - protein, 367 aa, Salmonella enterica subsp. enterica serovar Typhi Ty2
MTSRNYLLLTPGPLTTSRTVKEAMLFDSCTWDDDYNIGVVEQIRQQLTALATASEGYTSVLLQGSGSYAVEAVLGSALGPQDKVLIVSNGAYGARMVEMAGLMGIAHHAYDCGEVARPNVQAIDAILNADPTISHIAMVHSETTTGMLNPIDEVGALAHRYGKTYIVDAMSSFGGIPMDIAALHIDYLISSANKCIQGVPGFAFVIAREQKLAACKGRSRSLSLDLYAQWRCMEDNHGKWRFTSPTHTVLAFAQALKELAKEGGVAARHQRYQQNQRSLVAGMRALGFNTLLDDELHSPIITAFYSPEDPQYRFSEFYRRLKEQGFVIYPGKVSQSDCFRIGNIGEVYAADITALLTAIRTAMYWTK

SEQ ID NO: 52637 - protein, 229 aa, Lactobacillus johnsonii NCC 533
MKRKLAKLVLVRHGESVANRDNVYTGWNDVPLSKKGIAQAKNAGLKVEKIAEFAPTHIHTSVLSRAIMTANIIADVCSFLYLPITKTWRLNERHYGALRGINKDVSKKIFGTNQVLEWRRGFDSVPPLLTQPVQDRRYQKYDMRLMPQGESLHQTQERLMPYFWDHIAPELMAGHDQLVVAHGSSLRALIKKIEDISNEDIVKVEVPNAEPIVYTFDTDLHIVKKEILH

SEQ ID NO: 52638 - protein, 131 aa, Salmonella enterica
GLWEICIIWGLGISLAVYLTAGISGGHLNPAVTIALWLFACFPKQKVLPYIIAQFAGAFGGALLAYVLYSSLFTEFETAHHMVRGSVESLQLASIFSTYPAAALNVWQAALVEVVITSILMGMIMALTDDG

SEQ ID NO: 52639 - protein, 782 aa, Nostoc punctiforme PCC 73102
MIDEQEIEKLWQAFKVLDVDGNGAISTDELGEVMRSLGQNPTETGLRDLIKEIDVDLSGTIDFDEFKTLMIAKVGDRESRLKLAFSAFDEDNSGQITAVELRTVMSQFGLTDAELKEMLQEVDHDGDGSIDFEEFCQLVLEESESKTGYKDSPISLESSLKTVATNNTPVADTTQPTLQEATSNTTPELAQLREQLVQHPNSPNQKRSGTSRLQMQIGLFRLIQGAAYRSFRESFSANHETHLRVKNLPYRITDFVEFVKQAIALYKGLGVVEEACYPVLDAVVESIADEYARLQERIKDWKTVAKTPEMLAEEKKILEARSKFANVKEKFAAGVEFAITIKKKSLSLGDIVEGVLAINELNRLRGIEMNEEMAPPPPKSEGNPRDYLFKWNRVILSQATEEVDGAMMPVAYWYEDFMPKLLAAFSVSTAADIQSNTIPDEAALDEWYDLTKKSGEFNRYGADVAENFLNCTAKEKLILKQAWRLTHHYLNGVQKRRERLEFGRESGALSQYVSFIDVYLNRTEVKDSQMRVSFPYYIGPAVWRFFHTTAEIVCTKTDIQQKTLMAIFKDFFQLFATMYPCPYCRHHLNMYVVQNKEVDMYPVEYLVLGRDPNLRDFEVSLEAKLSTVVDGSSLRLFFWKLHNTVSSSIARSEEWYHKDEKAFYTTRFWPSLDSELARANALRYTSIETARIYNIYGMLKPLARLTGVKTELPKLLQKGDENSLKEACIVAQNHIADLEEAVIRGEFLQETYYFDPDVVDKAPLFTPEEEEFARTGMFIEAA

SEQ ID NO: 52640 - protein, 129 aa, Salmonella enterica
ICIIWGLGISLAVYLTAGISGGHLNPAVTIALWLFACFPKQKVLPYIIAQFAGAFGGALLAYVLYSSLFTEFETAHHMVRGSVESLQLASIFSTYPAAALNVWQAALVEVVITSILMGMIMALTDDGNG

SEQ ID NO: 52641 - protein, 416 aa, Vibrio vulnificus YJ016
MDIFKSINGHFTKLNPMYYQSNKQNKRQTGNTMEIARSLQQIQSSYIREILAAASDPSVISLAGGLPDEQTFPIELMKPTLEKLSEMPQVFQYGATAGYAPLLNFLKTYMSLPETHMAMACTGSQQGLDLIARAYINPGDTVVMEAPSYLGAMQVFGLVSANIATVSQTEAGPNLDELEACFKQHSPKMFYAVPDFHNPTGVCWSLETRKQVAKLCIEHKVAFIEDAPYRELRFQGEALPLVSDFCPQDSIVLRSFSKIASPGLRIGIVTGKVSYLEPLIKVKQGADLHSSVPMQALLLGLLEHEKFPEHMEKIRTLYQSRYQVLAEALQTQLPESCQLKSVDGGMFVWVTLPECDTFALAKSLLGNGVAVVPSPVFYPAEQKAQAALRLNFTNATPEQLKEAVTRLAEGLKLALV

SEQ ID NO: 52642 - protein, 210 aa, Oryza sativa
MAGRKRKAEAARAAEEEADRALYGAFRGAANSLSQLYALAGAHQRLSFHAGERHALEKLYQWMVRQHEIGLRLTVSDIASHIQHEIEYGGDNALTSPRSQHAFQNLQAPMHIPNTSTQQPPSCSITPSNPSKDSMIFSKALSSPVRQNLQLYHVQQCGDTGCFADGIFCPGNGDSDPAASNDSSVDMHSDSPGFPRPTEALRDSEGGRPS

SEQ ID NO: 52643 - protein, 414 aa, Burkholderia mallei ATCC 23344
MQFARAVAPGARTDRRRRLPESIEPTMKNNPVDVLINGSGIAGVALAHLLGARGHSVTVIERAARNRAQNGADLLKPSGIGVVRAMGLLDDVFAAGGLRRDAMRLYHDKAPIASLDYRSASALGYFILIPCEQLRRLLLAKLDGLPNVRLRFETSIERIERDADGTVTSLTLSDGERVAPTVLVGADGARSMIRDDVLRMPAERVPYATPMAFGTIALTDSVRECNRLYVDSNQGLAYFYPIGDQATRLVVSFPADEMQGYLADATRTKLLARLNEFVGDESADAMAAIGAGTAFPLIPLGRMNLDRYHKRNAVLLGDAAHSIHPITGQGMNLAIEDAGELGACLDLHLSGQITLADALERFERIRRPVNEAVISYGHTLATTYHDRAALVANFRSQLQTSGRDAAWLGAAVEV

SEQ ID NO: 52644 - protein, 371 aa, Vibrio vulnificus YJ016
MEIEMKNEYLLLTPGPLSTSETVREAMLKDWCTWDDEYNKDIVEVIRTKLVKLATKHSGYTSVLMQGSGTASVEATIGSAIGKEGKLLVVDNGAYGARIAQIAAYLNIPCHVVSPGETSQPHLNEVETALASDPAITHVAIVHCETTTGMLNPIEAFASVAKAHGKVVILDAMSSFGGIPIDIAELGIDFMISSANKCIQGVPGFGFVIAKQTELEKCQGQARSLSLDLYDQWHCMEVNHGKWRFTSPTHTVRAFYQALLELEQEGGIEARHNRYQTNQKTLVAGMRSLGFEPLLSDDLHSPIITSFYSPTHSDYQFKAFYTRLKEQGFVIYPGKVSNADCFRIGNIGEVYPADIERLIGAIEKAMYWQVA

SEQ ID NO: 52645 - protein, 130 aa, Brassica napus
  misc_feature (102)..(102): Xaa can be any naturally occurring amino acid
  misc_feature (107)..(107): Xaa can be any naturally occurring amino acid
  misc_feature (110)..(110): Xaa can be any naturally occurring amino acid
  unsure (1)..(130): unsure at all Xaa locations
SELVTWATKQTEAFSLLVKRHALASSAAAGGLRAAAECAQIALGHCSLLEARGLSLCPVLLKHFKPIVEQALEANLKRIEENTAAMAAADDWVLTNPPAGSXHASTXHFXNKLIQVPTFNLTGPSKPTLL

SEQ ID NO: 52646 - protein, 200 aa, Zea mays
VLRTLSISHILNTVPDAHNLYKNSFTYHSLQRDRPLDFDEANQYLEKCERDKSRVLVHCMTGKNRSAAIVAAFLMKSRGWRLAQSFQWVKDRRPQVQLTDASQKELLEYELKLFGPSTQTLVPTESFASLGFGYTKPAGDMQTPVFNQTTMPSIFERFNPNDRPANFTFGVERKAEANPRDNNSDGRVNPTSMENLMDSS

SEQ ID NO: 52647 - protein, 162 aa, Triticum aestivum
  misc_feature (87)..(88): Xaa can be any naturally occurring amino acid
  unsure (1)..(162): unsure at all Xaa locations
KEGTTLRWPGSRVTWEGFSDASDADLIAEHEIWAAVDPFAKNEAFNCSNGDLFKWKQLWPILADHFGLEWAGYEGEENRFKLEEAMXXKEAVWAEIVRENDLIATELDEITNWWFVDAMFAVETQLLDSMNKSKEHGFLGFRNTVSSFNTWIEKLKVFKIVP

SEQ ID NO: 52648 - protein, 401 aa, Xanthomonas campestris pv. campestris str. ATCC 33913
MARPDLHERISSLRKLRVAQERVRVRRQVGRRDGVRLEIDGRWLTGFCSNDYLGLSQQFEVVAALQDAAARDGAGATASHLICGHHTAHETLERDIAEWLGYPSALLFGSGFIANLAVQQALLSEEDDVCVQDRLNHASLLDATRLAGCRLRRYPHLDVEGAMRQLKGAPEGAAMLASDGVFSMDGDVAPLRALSLVARMQEALFYVDDAHGVGVLGPQGRGCVADAGLGVAEVPLQLVTLGKALGGYGAVVVGEEALIRHLAETARPYIYTTALPPAQVAATLAAVRLARRDDWRRTRLTELIGTFRDGARRHGFELMASDTPIQPLLCGEEPTVMAMSAALEQAGFMVGAIRPPTVPEGKARLRVTLSALHTPQQVQALVDAIVQARDVVSRQPQRALA

SEQ ID NO: 52649 - protein, 479 aa, Oryza sativa (japonica cultivar-group)
MSSQSVVAVKQITAPDKIVETCPSTKHSAHKLFDVKPDFQGLIDDNLSSSSQSSSIKIELIRSSSLPNILPFQKRSSEPEPESPLSHVSHPNVSEPVYSNSSTFCTSLFSSSSMETEPCRQLGTLPFLPHPPKCEQQVSAGHSSSSSLLVPGGDGDIGNAHDEPEQSDDLKDFLNLSGGDASDGSFHGENNAMAFAEQMEFQFLSEQLGIAITDNEESPRLDDIYGTPPQLSSLPVSSCSNQSVQKAGSPVKVQLSSPRSSSGSATTNKARLRWTLELHERFVEAVNKLDGPEKATPKGVLKLMKVEGLTIYHVKSHLQKYRLAKYLPETKEDKKASSEDKKSQSGSSGNDSVKKKNLQVAEALRMQMEVQKQLHEQLEVQRQLQLRIEEHARYLQRILEEQHKVSISSNSLSLKPPAESQPESPKPTSEKKEAESEAGAATSAQPSSEDKSPDAECKSSPPVGSKRARVHVGDEHQCS

SEQ ID NO: 52650 - protein, 444 aa, Burkholderia mallei ATCC 23344
MADDASSAPAAASAATASDTSAGAAASAAPTAPFSVDSSKINSGDTAWMLTSTALVLFMTIPGLALFYGGMVRKKNVLATVMQSFAITALITVLWTVVGYSLAFTPGNGFIGGFSRVFLSGMNYIHGDKATTLTVSHLASTIPESVYFVYQMTFAIITPALICGAFADRMKFSAMLVFMTLWSLIVYVPIAHMVWEPTGWLSADGVLDFAGGTVVHINAGIAGLVSCLMLGKRVGYGREAMAPHNLVLTLIGGSMLWVGWFGFNAGSAVAADGRAGFAMLTTQVATACAALGWMFAEWIAKGKPSVLGIVSGAVAGLVAITPAAGFVGVAGALVIGIAAGVVCFWSATWLKHKLGYDDSLDAFGVHGVGGILGALLTGVFAVKDIGGADGSLLLQAKGVAITLVYSGIVSFVLLKVIDIVIGLRVTEEEEREGLDVILHGEHVE

SEQ ID NO: 52651 - protein, 460 aa, Glycine max
  misc_feature (139)..(139): Xaa can be any naturally occurring amino acid
  unsure (1)..(460): unsure at all Xaa locations
QLRRPPPPPGIEPHSVKISPNGEFLVLDSENSNIYKVSGSMSRYSRPKLLAGSAEGNIGHIDGRPREARMNHPKGLTVDDRGNIYIADTLNMAIRKISDEGVTTIAGGKRGYAGGHVDGPSEDAKFSNDFDVVYVGSSXSLLVVDRGNHAIREIQLHQDDCTSYDEDDNSFNLGIVVLVAAAFFGYMLALLQWRVRAMFSSPDDPRAPSRKKGAPFVAQQMQRPPPTTKSVRPPLIPNEDEFEKQDEGFFVSLGRLFLNSGTCMSEILGGLFSGSKRKSLQYHQYQQQYQYANRYPNAWPMQESFVIPDEDEPPPSLETKTPTPRETYPIMTKELEKPQHFKPSRGYLKRWEGGDYQEQHQQLQQHHQQHQQEHPKLQHQQHQQQVKLQHQHQVHTRYSSTPQGYYEQNCETNEIVFGAVQEHDGRREAMVIKAVDYGDPKYTHHNIRPRLNYVGYSHGY

SEQ ID NO: 52652 - protein, 1049 aa, Bacillus megaterium [sequence omitted]

SEQ ID NO: 52653 - protein, 599 aa, Triticum aestivum
MGSIPNYCSYQTNSVGSLKLSPHIQFQQSCNNEVMFLSMRNKTQLAKRRATNYGTHRNSSRTPAPIVCSTGMPIIFVATEVHPWCKTGGLGDVVGGLPPALAAMGHRVMTIAPRYDQYKDTWDTNVLVEVIVGDRTETVRFFHCYKRGVDRVFVDHPMFLEKVWGKTGSKLYGPTTGTDFRDNQLRFCLLCLAALEAPRVLNLNNSEYFSGPYGENVVFVANDWHTAVLPCYLKSMYKQNGIYVNAKVAFCIHNIAYQGRFPRVDFELLNLPESFMPSFDFVDGHVKPVVGRKINWMKAGITECDVVLTVSPHYVKELTSGPEKGVELDGVLRAKPLETGIVNGMDVVDWNPATDKYISVKYNATTVAEARALNKEILQAEVGLPVDSSIPVIVFIGRLEEQKGSDILIAAIPEFLEENVQIIVLGTGKKKMEEELMLLEAKYPQNARGIAKFNVPLAHMMFAGANFIIVPSRFEPCGLIQLQGMRYGVIPICSSTGGLVDTVSEGVTGFHMGSFNVEFETVDPADVAAVASNVTRALKQYKTPSFHAMVQNCMAQDLSWKGPAKKWEEALLGLGVEGSQPGIEGEEIAPLAKQNVATP

SEQ ID NO: 52654 - protein, 390 aa, Oryza sativa (japonica cultivar-group)
MADQTAAAVVVGGGAAATMGEPSPPPPAPAAEAAGVGVGQQQRTVPTPFLTKTYQLVDDPAVDDVISWNDDGSTFVVWRPAEFARDLLPKYFKHNNFSSFVRQLNTYGFRKIVPDRWEFANDCFRRGERRLLCEIHRRKVTPPAPAATTAAVAAAIPMALPVTTTRDGSPVLSGEEQVISSSSSPEPPLVLPQAPSGSGSGGVASGDVGDENERLRRENAQLARELSQMRKLCNNILLLMSKYASTQQLDAANASSAAGNNNNNNCSGESAEAATPLPLPAVLDLMPSCPGAASAAAPVSDNEEGMMSAKLFGVSIGRKRMRHDGGGDDDHAATVKAEPMDGRPHGKDEQSAETQAWPIYRPRPVYQPIRACNGYEYDRAGSDQDGSNST

SEQ ID NO: 52655 - protein, 584 aa, GIBBERELLA ZEAE PH-1
MGVFNRLRPRVGSSKTSDVDATEMTTTTDQEKNGQSPEDGVNPVAGDNLPSEDVTEGVRNMEAITLVWTKKSLISLFICIWFVYLLNAFQSSTVGNLVPYVTSSWGAHSLLNVIDVVASSMTAAVFIPLAKLLDLWGRAEGYLLMVAFAELGLILMATSTNLPIYCAANVFYQVGFTGLIYSIDVITADATNLKNRALAYAFTSSPYMISAFAGSYASQEMLNDIGWPWGFGTFAFLTPVICAPLYILLKVNLHKAKKNILPREASGRTFKESVWHYLVEFDVGLVVFLLPFTIAATAPNGWATGYIIAMIVVGFVLLVGFAINEVYIAPVPFLKFHFLTDRTLVGACLLDLTYQISYYCWNNYFTSFLQVVNYLSVSEAGYVNNTFNVVSGFLLFLVGWSIRKTGYFKWLLWIGVPLYIFAQGLMIYFRSPTGYVGYLVMTQIFISIGGSVFTICMQLAVLAAVDHQHVAAALAMLSVTGTAGDSIGYTISGAIWTNTFEKALRKYLPASALDDLVSIYGNLDTQLSYAKGTPERIGIQKAYGYAQTRMLAAGTAIMALSFVWVALIRNLKVSEMKQTKGNVF

SEQ ID NO: 52656 - protein, 499 aa, Methanopyrus kandleri AV19
MFITSKEMRRIELNSRWLGFEEDFMMENAGAGVARVVIGEYSPNDVLVVCGTGGNGGDGFVTARHLDSEGVDVDVLLVGRREAIKNEAAELNLRRLDRAGIPVQEVRDSEDLESVDFERDVVVDALLGFGIRGRLREPVRSAVLRINEASRAGTRVVSIDIPTGLDPDSGETPDVAVEADLVVSIHRHKRGVRKLRDVFLRRVNAGIPEIAERICGPGDLITSDIWRRDPWSHKGQHGRVLIIGGSRKYVGAPQLAARGALRAGVDLVFLLTVDAVPKNDPNVIYRAVPAERLEPEHLDEVDLEGVDTVVVGPGLGADADSVGILRELAESFDGMIIVDADGLRGISGVNVDDRFVLTPHAGEFRREFGEELGRSLEDRSEAVRRVSEELGCTILLKGRVDVIGSPDGEIRWNVTGTPAMTVGGTGDVLAGVVAGVAARCREGFEAACIGAFVVGSAGCLAERRLSQGLTAEDVAEYVPKVLRNPWAAEPEAVTEVRRD

SEQ ID NO: 52657 - protein, 467 aa, Listeria monocytogenes EGD-e
MTSVMWFRRDLRVNDNKALYHACKEDDLLLLFQVNPAQFITGSPSHQAFFASVAHFKQEVDKTALLQIMFGEPVECLKQLKETLPSWDKVYFNRDETGYGAERDEAAKTFFDEQEIEVQAFHDSYLHSAEEVKKSPTEYYKIFTPYYKKWREEIKETPFKVTLKADNIRKENLFPKYEEQFAEMTCDLPILDSGEKTANTRLANFIKHDVADYDKARDFPELDKTSHLSRYLRTGEISVRTIWQALQENEATEGRAIFEKELCWRDFYNMIYVSFPNQKNEPIQENYRFIEWENNREFFKAWQEGKTGFPLVDAAMRQLKETGWMHNRLRMVTASFLTKDLLIDWRFGEKYFQQMLIDYDPASNIGGWQWAASTGTDAVPYFRIFNPTTQSQKFDPTGKFIRKYVKELANLPDKFIHQPEKMSEIEQKEYGLLLGKDYPFPLIDHKERRKLAIARYEFSKEHYRGNI

SEQ ID NO: 52658 - protein, 192 aa, Rubrobacter xylanophilus DSM 9941
MRFNQRERGFTLWFTGLSGAGKTTIAEIVEKELRERGRRVEVLDGDIVRTNLSKGLGFSREDRITNVLRIGFVANLLTRNGVAVIVSAISPYKEARDQVRRRIIDFIEVYVDAPLEVCAERDVKGLYKKAFEGEIQNFTGVSDPYEPPVAPELHIRTDQETPQESARRVIERLEYLGYLWDPEEAEDYHWSR

SEQ ID NO: 52659 - protein, 426 aa, Oceanobacillus iheyensis HTE831
MVADKAADSSNVNQENMDVLNTTQTIIKSALDKLGYPEEVFELLKEPMRILTVRIPVRMDDGNVKVFTGYRAQHNDAVGPTKGGIRFHPNVTETEVKALSIWMSLKSGIVDLPYGGAKGGIICDPREMSFRELEALSRGYVRAVSQIVGPTKDIPAPDVFTNSQIMAWMMDEYSKIDEFNNPGFITGKPIVLGGSHGRESATAKGVTIVLNEAAKKKGIDIKGARVVIQGFGNAGSFLAKFLHDAGAKVVAISDAYGALYDPEGLDIDYLLDRRDSFGTVTKLFNNTISNDALFELDCDIIVPAAVENQITRENAHNIKASIVVEAANGPTTMEATKILTERDILIVPDVLASAGGVTVSYFEWVQNNQGFYWSEEEIDNKLHEIMIKSFNNIYNMSKTRRIDMRLAAYMVGVRKMAEASRFRGWV

SEQ ID NO: 52660 - protein, 365 aa, Yersinia pestis KIM
MLQQQALPGTPRQDGFFMPAEWAPQDAVWMLWPYRQDNWRGKAIPAQQTFAKVAEAISRATPVFMGVPAEFMAQAKATMPANVTLVEMASDDAWMRDTGPTMVINGAAERRAVDWQFNAWGGLNGGLYADWQQDEKVAVQVSDFLKNAHYSAPLILEGGSIHTDGEGTLLTTAECLLNPNRNPHLNQAQIEQLLCDYLGVTHFIWLQDGVYNDETDGHIDNMCCFVRPGEVALHWTDDQQDPQYARSVAAFEVLSNTVDAKGRKLKIWKLPAPGPLYNTEEETFDVLTSDAVPRTAGERLAGSYVNFLISNQQIIFPLLDSRTDGQANDLLQQMFPGYAIVGVPAREILLGGGNIHCITQQIPAA

SEQ ID NO: 52661 - protein, 155 aa, Arabidopsis thaliana
MDLGRFPIISILEDMLEVPEDHNNEKTRNNPSRVYMRDAKAMAATPADVIEHPNAYAFVVDMPGIKGDEIKVQVENDNVLVVSGERQRENKENEGVKYVRMERRMGKFMRKFQLPENADLDKISAVCHDGVLKVTVQKLPPPEPKKPKTIQVQVA

SEQ ID NO: 52662 - protein, 366 aa, Solanum tuberosum
QMGLAENQLCFDLIQEWIVNNPKASICTYEGVQDFQDIAIFQDYHGLPEFRKAVARFMEKVRGDRVTFDPERIVMSGGATGAHESLAFCLADPGDAFLVPTPYYPGFDRDLRWRTGVQLFPVVCESSNNFKVTKEALEEAYKKAQESNIKVKGLLINNPSNPLGTILDKETLKDILRFINDKNIHLVCDEIYAATAFCQPSFISISEVMNEVVGCNDDLVHIVYSLSKDLGFPGFRVGIIYSYNDVVVNIARQMSSFGLVSTQTQRLIASMLSDTIFVENFIAKSAMKLSQRHDLFTKGLGQVGITTLKSNAGLFIWMDLRRFLENSTFDNELKLWHIIINKVKLNVSPGCSFHCSEPGWFRVCFA

SEQ ID NO: 52663 - protein, 437 aa, Debaryomyces hansenii CBS767
MSKRIVVTGLGLVTPLGVGVKSSWANLIANKSGLISTTTLPDYESAGWDKIPSKVVGKVPQGPITEGKWTSTDHFEKGEARRFALFSQYGLVATEEALKDANWFPQSEEEQNYTGVAVGSGIGSFEDVYENSVNFSQSGYKKVQPLFVPKILTNMAAGNISIKYGLKGPNHSVSTACATGLHSIGDAYNFIKNGYAKVMVAGGTEATIHPLALAGFARAKSVVTNYNDDPTKASRPFDKDRSGFVLSEGCGMMILEELDHALNRGLTEKDIYGEIKGYGLSGDANHITAPREDGDGAYRAMTMALKFAGVSPEEVDYVNAHATSTVIGDRSENNAIAELFKNNNNLSVSSTKSSIGHLLGAAGAVELIFTVKTIKENMMPPSLNLDNIGGHEDDDSSMFNKFDYIPNESKQKQANYSLCNSFGFGGTNSSLCLSKYK

SEQ ID NO: 52664 - protein, 694 aa, Oryza sativa (japonica cultivar-group)
MMMGREDKYVRFEDWRSEQSVMSPRRHNALSSLKERTAGVFAFLGNLVHSETLKRLVLHERKLTTRTLHPQGPFLQSWNKIFVLSCIFAVSVDPLFFYIPVINDNNTCWYLDKKLEITASVLRFFTDIFYILHIIFQFRTGYIASSLTTFGRGVLVEDRYAIAKRYLSTYFLIDVFAVLPLPQVVILVVLPNLGGSEVTKAKNILMFIVICQYVPRLIRIRPLYLQITRSAGVITETPWAGAVLNLLIYLLASHVLGALWYLLSIERKDACWRDMCSNNSTVCNQAYLYCGDKENSILRTACLPIDSNDIDPNFGIYVPALNNVSQSTNFLAKLFYCVWWGLQNLSSLGQNLKTSTYAWENLFAVFVSISGLVLFALLIGNVQTYLQSAHLREEEMRVKSRDTDQWMSYRLLPENLKERIRRHEKYRWHQTSGVDEELLLMNLPKDLRRAIKRHLCLSLLMRVPMFENMDDQLLNALCDRLKPVLYTEGSCIIREEDPVNEMLFIMRGNLMSMTTNGGRTGFFNSDVLKGGDFCGEELLTWALDPTSVSSLPSSTRTVKTMSEVEAFALRAEDLKFVATQFRRLHSKQLQHTFKFYSQHWRTWAACFIQAAWHRYCRKKIEDSLREKEKRLQFAIVNDGATTLSFRAAIYASRFAGNMMRILRRNATRKARLKESVPARLLQKPAEPNFAAEEQ

SEQ ID NO: 52665 - protein, 405 aa, Zea mays
MSALGTLSGGAAGVSGLLRLRRRVAPALAAPSHHAAGTLNCAALPDAAPLVWGRQLRPSLLLPATLLPSSSQGARRHTPRRPAAAAGREAKSVGFLEKYPALVTGFFFFMWYFLNVIFNILNKKIYNYFPYPYFVSLIHLVVGVVYCLISWSVGLPKRAPINGTLLKLLFPVALCHGIGHITSNVSFAAVAVSFAHTIKALEPFFSAAATQFILGQQVPFSLWLSLAPVVIGVSMASLTELSFNWTGFINAMISNISFTYRSIYSKKAMTDMDSTNVYAYISIIALIVCIPPAVIFEGPRLMQHGFSDAIAKVGLTKFVSDLFLVGLFYHLYNQIATNTLERVAPLTHAVGNVLKRVFVIGFSIVVFGNKISTQTGIGTSIAIAGVAMYSYIKAKIEEEKRKKSA

SEQ ID NO: 52666 - protein, 297 aa, Methanopyrus kandleri AV19
MLDVVGLGALNVDELLYIPRMPERDDSVPVERRVRRGGGSAANTICWLAHLGREVGFVGKVGSDDAGDLLLREFEEYGVDTSRVVRGDGHSGTAFCLVSGDDRRILVDPGVNDELRPDEVDLDYIRKARVLHTSSFIGLRSETSLETLKRTMKAVADELMVTFSPATMVLRGWSYLEPYFEAADVVFLNETEAVHLTGDIEETLNRLAELVEVTIVTRGSDPAIVQEGTEISEVAPEPVPEEDIVDPTGAGDAFAAGFIEGILRGEPADRCCERGHAVAAECLRIEGCRPPTEGRSE

SEQ ID NO: 52667 - protein, 570 aa, Candida albicans
MSEHKWWKEAVVYQIWPASYKDSNGDGVGDIPGIISTLDYIASLGVTTVWLSPMYDSPQDDMGYDVSDYENVYSKYGTLQDMDRLIAGCHDRGLKLILDLVINHTSVEHKWFKESRLSKDNPKRDWYIWKPPRIDSNGNKHPPNNWGSYFSGSAWKYDELTGEYYLHLFAESQPDLNWENKECREAIYNSAIKFWLDKGVDGFRIDTAGMYSKYQHFKDAPVAFPDTEFQPCEIYHKNGPRIHEFHKEMAKVMEPYDTMTVGEVGHSTREQALKYVSAAEKEMNMMFLFDVVELGSDPRDRFRYNGFDLVDLKKAIKSQGEFAEGTDAWSTVFIENHDQARAISRFGNDSPEFRVLSGKAIAMLQCCLTGTLFIYQGQEIGMTNVPRSWPIEEYKDINTINYYRAFKEKYGKDADYKQKEEKLVDVINRLARDNARTPVQWSHQQYAGFSEVEPWMRVNDNYKEINVEDQDGDDHSLLNFYRKLLKLRGEYKDLFVYGEMKFLDFDDKKLFTFAKEAPGSPVAYIVINFSGEDVKFEPLIKGNYKLVLTNVDKDSKDALSPYEARMYVVD

SEQ ID NO: 52668 - protein, 525 aa, Ralstonia metallidurans CH34
MTRLLRLCKILFVILYYGLDELVLSGFKNRRIKFLVRVITIGRKLDQPRGERLRMALTALGPIFVKFGQVLSTRRDLMPPDIADELAKLQDQVPPFESAVAVKIIEKSLGRRLTELFETFEHEPVASASIAQVHFATLRGGPSHGREVAVKVLRPGMLPVIDSDLALMRDMATWLERVWVDGRRLKPREVVAEFDKYLHDELDLMIEAANASQLRRNFAESDLLCVPEVFWDWCTSSVFTMERMHGIPISRTESLKAAGVDMHKLAEEGVEIFFTQVFRDGFFHADMHPGNILVSVRPETFGRYIALDFGIVGALSEFDKNYLAQNFIAFFRRDYHRVALLHVESGWVPPETRVEELESAVRACCEPYFDKPLREISLGMVLMRLFQTSRRFNVEIQPQLVLLQKTLLNIEGLGRQLDPDLDLWKTAKPFLERWMYEQVGWQGAWERIKIEAPQWAKMLPDFPRLAHQFLERRALQNNEGQERLLTQLVAEQRRTNRRLSTALLLMGGFLAGIVIVQALAWAGYW

SEQ ID NO: 52669 - protein, 377 aa, Arabidopsis thaliana
MMIAQELGIYVVESKGGAILCLLLSLLCLGTWPALMALLERRGRLPQHTYLDYSITNFLAAIFIAFVFGGIGESTHEAPSFITQLTQIQDNWPSVLFAMAGTTVNYFLDNGLNRADILFSGVGCFLVAVCLGSAVHSSNSADIKAKLGKLSGDCETVTPEECQRLFGVEEEEEEKEMENVKEGSAAFLIALENKRAIKVLGKSMVVGLGITFFAGLSFSLFSPLFNLATNDQWHTLKQGVPKLIVYTAFFYFSLSCFVIAVALNISFLYKPVLDSPRSSFREYLSDWNGRGWALAAGLLCGFGNGLQFMGGQAAGYAASDAVQALPLVSTFWGIYLFGEYRRSSTRTYALLVGMLVMFTVAVGLLMASAGERETRFT

SEQ ID NO: 52670 - protein, 639 aa, Kluyveromyces lactis NRRL Y-1140
MDQSDMKVNMDRKIQSRSSSFDNNEDSFPNANKENLTFAEENHKQELLDEYGVPDKLRANRSLVIRKMEIMRKQYTSVFAICVFLFTAFLAGVGTDLNSQLRNNYTTYATNSYRSHSLLSTIGVVSSIISAGALTVYARLSDVFGRIRLYLSAMLFFVVGTIIQSQANNVQKYAAGTVFYSLGTAGIQVMMFIIMSDFSSLKWRLFFTFAPTWPNLFIPWITGSIVDRLDPVERWSWGIGMWAFIYPLSSVPFVAYLLLVRYKASKTEEWKMLSSEKTYYETHGIIQTLVQLFWKVDVVGLLLFVAFLGCILVPLTLAGGVSSQWSNGKILGPFILGFCLVPAFILWETKYARLPIAPFKMLKDRGIWSALIISMLAKTVYYLAAGYLLTILMVAVNQSRGMAAVIMNVWSVVGCGFSPFFSYFVVRVRRLKPFIIIGCGIWMVSMGLLYYYRSGEHSKGGIIGAMVLWGLGSTMITRTTVISSQSITAHENMATITAIMLAISRIGGGIGSAVSGAIWTQTLYAKLVETIGDPEIAKKVYQSPLSAIRVYAWGTPTRDAIVEAYRHVQRFEVLVAMILVIPLFIASLCLRDPELTDEVAHTDIKDGEFIAVDGNDAIANWFSNKWENIKLRRRSHSDE

SEQ ID NO: 52671 - protein, 490 aa, Leptospira interrogans serovar Copenhageni str. Fiocruz L1-130
MRKFDKTLFHEFRRIYKFMPESYDLTVIGAGPGGYVAAIRAAQLGMNVCIIEKDKPGGICLNWGCIPTKALLESAHLLEKLHSAKEYGINLSDPKPDFAAIIRRSRNVAEGMASGVEFLLNKNKITRKKGTAVFKDPNTIWLPDSSKEEITSKYFILATGARARELPDLPFDSHTVLSSKTAMIQDKIPESLLIVGAGAIGVEFADFYSTMGTKVTLVEMMDQILPVEDKEISTFLEKSFVKRGIRVLTGVGVSDPKIVNGKVKVLLKGKNLPEAVESFEAEKILVSIGLVPNTDSMHLEEIGIFLQKGFVKTDTKYKTSVPHIYAIGDCNGAPLLAHVASMEGIKAVEAISIHAGNPHHLSYIPIDYNAIPGCTYCHPEVASIGFTEKKATDMGYTISVGKFPFVASGRAKAMGDTGGFTKVIVDKTSGEILGAHLIGPGVTELLPAVSLGITQELTAKEIASTIFAHPTLSETVMESFGAALGEAINL

SEQ ID NO: 52672 - protein, 454 aa, Thermococcus kodakarensis KOD1
MAEFKYSRIFLLGFGFFGISIIWALYNAYIPLFLQDTFHMNRTITGFIMTIDNLFAVLLLPFLGALSDMTRTRLGRRKPYILLGAPSAALMFALIPVAREHGNLALFMGTIIFMNFFMALFRSPVVAFMPDITPSEKRSQANGIINFMGGLGALLAYFGGKVLYDMSYAYPFYAGALIMLLANLLVVLFVPEPEEYRVPGKKINLRELLSETSRKSFGELKENLKDVFASHERSLLAILLAIFFWFIAFNSLETFFTSYVKYHLYGIPVGAAETEITRKIESTGAFMLGMFSLSFMIFAIPAGFLGARIGRRKTITLGLLTIIAIILAAFFIGETSKPQEVALTDPVIMKFMGLFFVGGIGWAMINVNSLPMVVDMTVDEKVGGYTGLYYFFSQAANLVAPPFAGALLDLIGYETLLPFAMAFFLLALIAMQFVRRGDVKGGAEDVYEYVPDMD

SEQ ID NO: 52673 - protein, 318 aa, Pseudomonas aeruginosa UCBPP-PA14
MLWESEWGVSLADVQQDFAAVANAIARFEPVKLVVDPAALDRAGELCAGNVELIELAIDDSWCRDSGPSFVCHPQLGLAGVSWRFNAWGGKSAYAQDASLARRILDGLGLECFGVPLANEGGAIHVDGEGTLITTESVLLNANRNPGLSKAEIEALFARLLGVTRTIWLPGDPDRVTGDMTDGHVDGVCAFARPGALLLDATCDTTSAYAEVVRENRRALELALDARGRRFELIELFDAGEVAPEEGVFCASYTNFYIANGAIIMPAYGVAADDAAAATLARAFPAREVVPVRIDHLAHGGGGVHCITQQQPAWPARR

SEQ ID NO: 52674 - protein, 584 aa, Oceanobacillus iheyensis HTE831
MFWKSVVGKLSLTILLLVSFVLCVLTFFLMQFFDNYHIQEAENEMEQMATKISSLVETDHEQPFIEEVTEMLKDPSSRIAIMYSEQENWISDSNDENLQEFDVDWIEGQEEINTVIEDKQQISNQFHTANNTEVILVGAPIDDGGAVFVYKSLDMINQTKDQTTKLILLSAGIAILLTTFFAVFLSTRITSPLIKMKEAAHNLTRGEFNTKVPVLTRDEIGELAIEFNRMGRQLNYHINALRQEKEQLSSIVSSMADGVFTLNREGEVLVINPPAKKYMDEWFYENPDESEGQNHLPTEVKEALLEVITKEYAVLKESAVQGRSYVMLVTPLYDESHVRGCVAVIRDMTEERRLDKLRKDFIANVSHELRTPISMLQGYSEAIVDDVASSKEEKNELAQIIYEESLRMGRLVNELLDLARMEAGQIQLRLDSVAIQPFIERIVHKFQGISREEMVELELTVDIEHQIGEMDPDRIEQVLTNLIDNAIRHTSNNGFVKVLAVSNQDKLYVEVKDSGSGIPEEDLPFIFERFYKADKSRVKKEKQGTGLGLAIAKNIIDAHHGSIYVKSKLDAGTTFSFEIPIKQN

SEQ ID NO: 52675 - protein, 963 aa, Arabidopsis thaliana
MAARNLEKMASIDAQLRLLAPGKVSEDDKLIEYDALLLDRFLDILQDLHGEDVREFVQECYEVAADYDGNRNTEKLEELGNMLTSLDPGDSIVVTKSFSNMLSLANLAEEVQIAYRRRIKKLKKGDFADEASATTESDIEETLKRLLQLNKTPEEVFDALKNQTVDLVLTAHPTQSVRRSLLQKFGRIRDCLTQLYAKDITPDDKQELDEALQREIQAAFRTDEIRRTPPTPQDEMRAGMSYFHETIWKGVPKFLRRVDTALKNIGINERVPYNAPLIQFSSWMGGDRDGNPRVTPEVTRDVCLLARMMAANLYFSQIEDLMFEMSMWRCNEELRVRAERQRCAKRDAKHYIEFWKQIPANEPYRAILGDVRDKLYNTRERARQLLSSGVSDVPEDAVFTSVDQFLEPLELCYRSLCDCGDRPIADGSLLDFLRQVSTFGLALVKLDIRQESDRHTDVLDAITTHLGIGSYKEWSEDKRQEWLLSELSGKRPLFGPDLPKTEEVADVLDTFKVISELPSDSFGAYIISMATAPSDVLAVELLQRECGITDPLRVVPLFEKLADLESAPAAVARLFSIEWYRNRINGKQEVMIGYSDSGKDAGRLSAAWQLYKTQEELVKVAKEYGVKLTMFHGRGGTVGRGGGPTHLAILSQPPDTIHGQLRVTVQGEVIEQSFGEEHLCFRTLQRFTAATLEHGMHPPVSPKPEWRVLMDEMAIIATEEYRSVVFKEPRFVEYFRLATPELEYGRMNIGSRPSKRKPSGGIESLRAIPWIFAWTQTRFHLPVWLGFGGAFKRVIQKDNKNLNMLKEMYNQWPFFRVTIDLVEMVFAKGDPGIAALYDRLLVSEELQPFGEQLRVNYQETRRLLLQVAGHKDILEGDPYLRQRLQLRDPYITTLNVCQAYTLKQIRDPSFHVKVRPHLSKDYMESSPAAELVKLNPKSEYAPGLEDTVILTMKGIAAGMQNTG

SEQ ID NO: 52676 - protein, 432 aa, Actinobacillus pleuropneumoniae serovar 1 str. 4074
MRTTELIELDQKHIWHPYSSITHPIPTYPVERADGVIITLKDGKKLIDGMSSWWAALHGYNHPRLNQAATEQLSKMSHIMFGGLTHEPAAKLSQKLLEILPPELNKIFFADSGSVAVEVAMKMALQYAQASGQKNAKKRTKFATIRSGYHGDTWHAMSVCDPVTGMHGLFNSSLPVQYFLPQPSVKFGEAWRDEAILPLQDLFEQHGDEIAALILEPVVQGAGGMYFYSPVYLQKARELCDRFGILLIFDEIATGFGRTGKLFALQHAEVVPDIICLGKALTGGYLTLSATVTTEKVATVICEGEAKCFMHGPTFMANPLACAIAYESINLLLESDWQANIQRIERQLLEELAPAKHFKSVAEVRVLGAIGVLEMQQPVDLVPLQKLFVEHGIWVRPFGKLVYIMPPFIISQAELTQLTSALLQVLKIAYNE

SEQ ID NO: 52677 - protein, 533 aa, Zea mays
  misc_feature (57)..(57): Xaa can be any naturally occurring amino acid
  unsure (1)..(533): unsure at all Xaa locations
MQIFVKTLTGKTITLEVESSDTIDNVKAKIQDKEGIPPDQQRLIFAGKQLEDGRTLXDYNIQKESTLHLVLRLRGGMQIFVKTLTGKTITLEVESSDTIDNVKAKIQDKEGIPPDQQRLIFAGKQLEDGRTLADYNIQKESTLHLVLRLRGGMQIFVKTLTGKTITLEVESSDTIDNVKAKIQDKEGIPPDQQRLIFAGKQLEDGRTLADYNIQKESTLHLVLRLRGGMQIFVKTLTGKTITLEVESSDTIDNVKAKIQDKEGIPPDQQRLIFAGKQLEDGRTLADYNIQKESTLHLVLRLRGGMQIFVKTLTGKTITLEVESSDTIDNVKAKIQDKEGIPPDQQRLIFAGKQLEDGRTLADYNIQKESTLHLVLRLRGGMQIFVKTLTGKTITLEVESSDTIDNVKAKIQDKEGIPPDQQRLIFAGKQLEDGRTLADYNIQKESTLHLVLRLRGGMQIFVKTLTGKTITLEVESSDTIDNVKAKIQDKEGIPPDQQRLIFAGKQLEDGRTLADYNIQKESTLHLVLRLRGGY

SEQ ID NO: 52678 - protein, 184 aa, Arabidopsis thaliana
TFLSRLSSSLRESLSQRRPWLELVDRSSFARPDSLTDSFSRIRKNLAYFKVNYSAIVSLVLAFSLLSHPFSLLVLLSLLGSWMFLYLFRSSDQPLVLFGRSFSDRETLLGLVLTTIVVVFMTSVGSLLTSALTIGIAIVCLHGAFRVPDDLFLDEQEPANAGLLSFIGNSAATSAAASVVAGRV

SEQ ID NO: 52679 - protein, 855 aa, Sorghum bicolor
MAFSPRSPWSRPKRNDVYSTFVVHGDDDEDDARGSRRGRGPSTRAEEDEEEDPSSLPPLLQRLPKDFGGPSFDEDEDAYSSDPDDASLSATVVFKSGAPASARSPFLDLRRSSPRATDDDPYSTFVVHSTARSGGTSSSPRGSASGTFIRRSGGSSSPHESVSGTFIRRTSTPSSPRDSVSGTFIRRPGSPSSPRGSFSGTFIRHTSGGSSSYESASGGGGGFGSSFWSPAVEQTEELRQPSPLMQQQQQQHSRRKPSVSSAPDSVTREDPSTKYELLHELGKGSYGAVYKARDLRTQELVAVKIISLTEGEEGYEDIRGEIEMLQQCSHPNVVRYFGSYQGEDYLWIVMEYCGGGSVADLIGITEEPLDESQIAYICREALKGLAYLHSIFKVHRDIKGGNILLTEQGEVKLGDFGVAAQLTRTMSKRNTFIGTPHWMAPEVIQESRYDGKVDVWALGVSAIEMAEGMPPRSTVHPMRVIFMISSEPAPMLEDKEKWSLLFHDFIAKCLTKDPRLRPAASEMVKHKFIEKCNSGASKMLAKIKEAKKIRATLAVQNELSDPDNTMQDVPVRINEDYGETVPTNSQQHMNHGTYNDCQAGDFGTMIVHTEDGDEVAESPIFPRTEFIPGLGSINSFTHDPKRAELISSFWAENTGDSDANKDRDLDDRPDIQESKAIPPLTGTVKKHIGAEGTIRRHDNQVNLSPGFANTTKLNSSPSRKAFSVQDKLWSIYAAGNTVPIPFLKAIDISPLALVSENEAGNGLAGSSTNDALEAVRELFSGDGQAKKGRKGQNEVPLPPGVHHRLMTSPTLMNLAQALAYHKTCYEDMPLQDSQATQEQQTIQNLCDTLRTILRL

SEQ ID NO: 52680 - protein, 648 aa, Sorghum bicolor
MGKHMRIKTAPKGNRAPLLGDGETSRGLTDLEEGSNVQPANVGFCRVIKLAKHDAGKLVLATMALLVASLSNLLVPKYGGKIIDIVSRDVRRPEDKAQALEDVKGTILYIVTIVLVGSVCTALRAWLFNSASERVVARLRKDLFSHLINQEIAFFDVTRTGELLSRLSEDTQIIKNAATTNLSEALRNLTTTAIGLGFMFSTSWKLTLLALVIVPVISVAVRKFGRFLRELSHQTQAAAAVASSIAEESFGAIRTVRSFAQESHEISRYGGKVEETLKLGLKQAKVVGLFSGGLNAASTLSVVIVVIYGANLTINGYMTTGSLTSFILYSLTVGSSVSALSGLYTTVMKASGASRRVFQLLDRVSSMTNSGDKCPINEKDGEVELDDVWFAYPSRPSHMILKGITLKLAPGSKVALVGPSGGGKTTIANLIERFYDPLKGRILLNGVPLVEISHQYLHSKVSIVSQEPTLFNCTIEENIAYGLEGKANFADVESAAKMANAHNFICTFPDQYKTVVGERGIRLSGGQKQRIAIARALLMNPRVLLLDEATSALDAESEYLVQDAMDSLMKGRTVLVIAHRLSTVKSADTVAVISDGLIVESGTHDELLDHNGIYTALVKRQLQGPKFEATSSINDASEIEAEPSRNGQ

SEQ ID NO: 52681 - protein, 475 aa, Rickettsia montanensis
MNLLKNITGKNYINGEFIEFGKQISVINPATLKEIATVPNLGLSEINSAINNTVTSFSSWSQSSFEARIAILRRWYNLVIENIEELSHILTLEQGKVLAESKKEILYGVSFIDWYTYAIHNIHSTIKPGNSKAHKIVTQYEPVGPSAAITPWNFPNAMITRKVVPAIAAGCSVILKPSSLTPLSALVLAKFASDAGLPAGVFNVITGSSDIIGKAFCEDFRLRKLSFTGSTNVGKILYQNAANTLKRLSLELGGNAPFIITADNNLEKVVSDLITAKTRNSGQSCISPNRIFIEESIYEKFIEILKAKFTKLKAGDGFDKESDVGPLINSAAIEKIQKLLADAQSKGAKLICGGKAVDNFIEPTIIIDCLDNMDIFRTEIFGPVVACYKFKDLDEVIERANNTEYGLQGYVYSNNISVVQMIASKLDFGMVSINDPLPANAKAPFAGRKASGFGVEGSFEGIFEYLNTKYINLQH

SEQ ID NO: 52682 - protein, 475 aa, Rickettsia rickettsii
MNLLKNITGKNYINGEFIEFGKQISVINPATLKEIATVPNLGLSEINSAINNTVTSFALWSQSSFEARIAILRRWYNLVIENIEELSHILTLEQGKVLAESKKEILYGASFIDWYTYAIHNIHSTIKPGNSNTHKIVTQFEPVGPSAAITPWNFPNAMIARKVVPAIAAGCSVILKPSSLTPLSALVLAKFASDAGLPSGVFNVITGSSDIIGKAFCEDFRLRKLSFTGATNVGKILYQNAANTLKRLSLELGGNAPFIITADNNLEKVVSDLVIAKTRNSGQSCTSPNRIFIEESIYEKFIEILKAKFTKLKAGDGFDKESDVGPLINSAAIEKIQKLLADAQSKGAKLICGGKTVDNFIEPTIIIDCLDNMDIFRIEIFGPVVACYKFKDLDEVIEHANNTEYGLQGYVYSNNISVAQMIASKLDFGMVSINDPLPANAKAPFAGRKASGFGVEGSFEGIFEYLNTKYINLQN

SEQ ID NO: 52683 - protein, 606 aa, Cryptococcus neoformans var. neoformans JEC21
MSLPRRVSFPPDTQEDPPVSDSPLSSPKLPEYDPQSSSTTPIVSSNLPTDTANTASAGPRRRQQPSRQVTLDARPPSAARRGTTESARTQHSRAGSRRTSNSLDPNPGLIRRVTTVLFTPPKKIGKAPTYWGSIKAAITSTWLNILLVFIPIGWALYLAKHSGGKDSISDTAVFCCTFIAIIPLAGLLGFATEEAALRLGQTLGGLLNATLGNAVELIVAILALIKCELQVVQSSLVGSILSNILLVLGMCFFAGGVRFAEQAIKSTAAQLNASLLLIAVIAVLIPSAFHFSISSSTSNTDASELANGEGADLLSMSHAVSILLLILYLGYLLFQMWTHATYYVDDAVTGSTQYPEAITNVSEKLKFRNFHRRKHDEEEGYSTATTVSEATVPPSARPGGGEVPATHGPGTVASETGNRVEHESEEEEEEEETPQMNVVCTIALMVIDTVLVGVTAEFLVDSINGMVESNPSLSAEWVGLILLPIVGNAAEHFTAVSVSVKDKLDLSISVAVGSSIQIALFVIPVIELLAWTIGKPMTLLFDPYESIVLFLSVLIVNQTLADGRSNWMEGMVLMMLYIIIAVSFWYYPGSTTATLLGCQDSSSVTG

SEQ ID NO: 52684 - protein, 599 aa, Cryptococcus neoformans var. neoformans JEC21
MFHQNTQEDPPVSDSPLSSPKLPEYDPQSSSTTPIVSSNLPTDTANTASAGPRRRQQPSRQVTLDARPPSAARRGTTESARTQHSRAGSRRTSNSLDPNPGLIRRVTTVLFTPPKKIGKAPTYWGSIKAAITSTWLNILLVFIPIGWALYLAKHSGGKDSISDTAVFCCTFIAIIPLAGLLGFATEEAALRLGQTLGGLLNATLGNAVELIVAILALIKCELQVVQSSLVGSILSNILLVLGMCFFAGGVRFAEQAIKSTAAQLNASLLLIAVIAVLIPSAFHFSISSSTSNTDASELANGEGADLLSMSHAVSILLLILYLGYLLFQMWTHATYYVDDAVTGSTQYPEAITNVSEKLKFRNFHRRKHDEEEGYSTATTVSEATVPPSARPGGGEVPATHGPGTVASETGNRVEHESEEEEEEEETPQMNVVCTIALMVIDTVLVGVTAEFLVDSINGMVESNPSLSAEWVGLILLPIVGNAAEHFTAVSVSVKDKLDLSISVAVGSSIQIALFVIPVIELLAWTIGKPMTLLFDPYESIVLFLSVLIVNQTLADGRSNWMEGMVLMMLYIIIAVSFWYYPGSTTATLLGCQDSSSVTG

SEQ ID NO: 52685 - protein, 474 aa, Xanthomonas campestris pv. campestris str. ATCC 33913
MFVVSEMADFIKAGGLGDVAAALPRALRHRYDVRVLIPGYRAVLARAGKVEIVGRVLAHAALPACDIGRIVQSDGLPIYILLSKELFERDGSPYVSTSGSEFEDNAIRFATLSHAAAQIAAGRAGLGWRPRLLHLNDWPCALAAAYVRWSGGTTPCLLTIHNLAYQGLVPYSMAAALGIPAERVSELEFYGQMSFLRGGIVHADHVNTVSVSYAQQITGPAQGCGLDRLLAGRAAKGALSGIVNGIDASWDPRTDEYLDSHFSVNHWQGRQANAAQVRKAFGLRESTGPLFAVVSRLVHQKGLDLICEVAPQIVAAGGQIAVIGGGEPEIEQQVAELTRRYPGQVGAFIGFEEGLARRMFAGADFLLMPSRFEPCGLSQMYAQRFGCLPIAHATGGLIDTVDDGVTGFLFQQASAEALRRCLERAFRTFRLPSLLSAMRRAAMLRPSGWDVAGKKYISLYERTAATAPAVATVS

SEQ ID NO: 52686 - protein, 549 aa, Thermococcus sp. KS-8
MAQLSGQPVVILPEGTQRYVGRDAQRLNILAARIIAETVRTTLGPKGMDKMLVDSLGDIVVTNDGATILDKIDLQHPAAKMMVEVAKTQDKEAGDGTTTAVVIAGELLRKAEELLDQNIHPSIIIKGYALAAEKAQEILEEIAIKVNPDDEETLLRIAMTSITGKNAESHKELLAKLAVDAVKQVAEKKDGKYVVDLDNIKFEKKAGEGVEESELVRGVVIDKEVVHPRMPKRVEGAKIALINEALEVKKTETDAKINITSPDQLMSFLEQEEKMLKDMVDHIAQTGANVVFVQKGIDDLAQHYLAKYGIMAVRRVKKSDMEKLAKATGAKIVTNVKDLTPEDLGYAEIVEERKLAGENMIFVEGCKNPKAVTILIRGGTEHVIDEVERALEDAVKVVKDVMEDGAVLPAGGAPEIELAISVDEYAKQVGGKEALAIENFADALKIIPKTLAENAGLDTVEILVKVISEHKNKGLGIGIDVFAGEPADMLERGIIAPLRVTKQAIKSARAAIMILRIDDVIAAKVSKPEGRQGAECPPNGCMGGMDMRM

SEQ ID NO: 52687 - protein, 545 aa, Thermococcus sp. KS-8
MAQLAGQPVVILPEGTQRYVGRDAQRLNILAARIIAETVRTTLGPKGMDKMLVDSLGDIVITNDGATILDEMDIQHPAAKMMVEVAKTQDKEAGDGTTTAVVIAGELLRKAEELLDQNIHPSIIIKGYALAAEKAQEILDSIARDVDVEDREILKKAAMTAITGKAAEEEREYLAEIAVEAVKQVAEKVGDRYHVDLDNIKFEKKEGGSVKDTQLIKGVVIDKEVVHPGMRKRVEGAKIALINEALEVKETETDAEIRITSPEQLQAFLEQEEKMLREMVDKIKEVGANVVFVQKGIDDLAQHYLAKYGIMAVRRVKKSDMEKLAKATGAKIVTNVRDLTPEDLGEAELVEQRKVAGENMIFVEGCKNPKAVTILIRGGTEHVVDEVERALEDAVKVVKDIVEDGKIVAAGGAPEIELAISVDEYAKEVGGKEQLAIEAFAEALKVIPRTLAGNAGLDPIETLVKVIAAHKEKGPTIGVDVFEGEPADMLERGVIAPVRVPKQAIKSAKAAIMILRIDDVIAASKLEKDKEGGKGGTRDFGSDLD

SEQ ID NO: 52688 - protein, 214 aa, Methanopyrus kandleri AV19
MTITEEDLIEPLRKVVEYSPPRRFLETVDMIVNVKGVDLSDPSQRIDKEVVLPHGRGKPVNVCVIAEGEMAREAEEAGATVINREKLEELAENVREAKKIARRHEFFYAQVDLMPDVGRVLGPVLGPRGKMAKPVPPNADIRALIERAHRTARVRMRDQPVIHTVIGARNMEPEQLAENAMAVLREITSELEKSWAQIDSVYVKTTMGPAERVY

SEQ ID NO: 52689 - protein, 215 aa, Glycine max
MASPPTLPISSQSSASGGSASQSQPPIATPAFRAFISRISSSLRHAFAQRRPWAELIDRSSMSRPDTLAEAYSRIRKNFGYFRVNYLTLIALALAVSLITHPFSLFVLFGLLASWSFLYLFRPSDQPVVLFGRTFADRETLGILVVLTVFVIFLTSVGSLLISALMVGLAIVCAHGAFRVPEDLFLDDQEPNSSGFLSFLGGAAASAAAPAVARV

SEQ ID NO: 52690 - protein, 552 aa, Sulfolobus tokodaii
MSTTATVATTPEGIPVIILKEGSSRTYGKEALRINIAAVKAVEEALKSTYGPRGMDKMLVDSLGDITITNDGATILDKMDLQHPAAKLLVQIAKGQDEETADGTKTAVILAGELVKKAEELLYKEIHPTIIVSGFKKAEEQALKTIEEIAQKVSVNDMDILKKVAMTSLNSKAVAGAREYLADIVAKAVTQVAELRGDRWYVDLDNIQIVKKHGGSINDTQIIYGIVVDKEVVHPGMPKRVENAKIALLDASLEVEKPELDAEIRINDPTQMKKFLEEEENLLKEKVDKIAATGANVVICQKGIDEVAQHYLAKKGILAVRRAKKSDLEKLARATGGRVVSNIDELTPQDLGYAALVEERKVGEDKMVFVEGAKNPKAVSILIRGGLERVVDETERALRDALGTVADVIRDGRAVAGGGAVELEIAKRLRKYAPQIGGKEQLAIEAYASALENLVMILIENGGYDPIDLLVKLRSAHENEANKWYGINVFTGQVEDMWKLGVIEPAVVKMNAIKAATEAATLILRIDDLIAAGKKSESKGGESKSEEKKEED

SEQ ID NO: 52691 - protein, 448 aa, Corynebacterium diphtheriae NCTC 13129
MSPIDEKVQGYYELLLKRNPAEPEFHQAVNEVLDSLKIVLEKDPHYADYGLIQRLCEPERQLMFRVPWVDDNGVVQVNRGFRVQFNSAIGPYKGGLRFHPSVNLGIIKFLGFEQIFKNSLTGLPIGGGKGGSDFDPKGKSDVEIMRFCQSFMTELYRHIGEYRDVPAGDIGVGGREIGYLFGQYRRLANQHESGVLTGKGLTWGGSLVRTEATGYGLVYFTAEMLAHHGQSFEGKKVIVSGSGNVAIYAIEKAQELGATVIGFSDSSAWVETPNGVDVAKLKEIKEVRRERVSSYVDEVEGAILHTEGSIWDLTCDVALPCATQNELDGEHAKKLADNGCAFVAEGANMPSTADAIEVYRERGIHFGPGKAANAGGVATSALEMQQNASRDSWSFEYADQRLREIMKGIFKNCESTAREYGHEGDYVVGANIAGFKKVADAMLAQGVI

SEQ ID NO: 52692 - protein, 326 aa, Methanopyrus kandleri AV19
MAKIYGDEDASLEPLEDKTVAVIGYGSQGEAQAKNLRDSGIDVIIGVREGGPSWERAKKDGFEVLPIPEAAEAGDVVHILIPDEVQPQVYREHIHDNLEKGNALGFSHAYNIHYGLIEPPEYVDVILVAPKGPGHMVRKLYTEGFGTPALVAVHQDYTGEAMDLALAMAKAMGFTRAGVIKTTFREEVETDLFGEQVDLVGGVLYMILYAFETLVEAGYQPEVAYFETLHELKLIVDLIYEKGLSGMLDNVSNTAEYGGLTRGKRIINKEEMRKVLEEIRSGEFAREWTLENESGRIVMKRLREEIENHEIEKVGERLRKMMGFED

SEQ ID NO: 52693 - protein, 434 aa, Corynebacterium diphtheriae NCTC 13129
MTFNEAKSSTMKTVLAHSMERLEWQRDIYKRMHQHPELSGTEQWTAQMICDELDQFDCEVTTHIGGYGIVAVFHNGDGPCVLMRADFDGLPVLELTGAEFASTRKQDRNGTLVPVMHACGHDMHTTALLGCCAALNAHRDAWSGTFVALFQPSEENGQGAAAMVADGLGRAIPRPDVCFGQHIVPGPAGQVMTMPGPALAACDSIEIIITGRSAHGSMPHNAIDPTYIASMIVIRLQGIVGREIPPDQFAVVSVGTLESGNSNNTIPGTARIVVNCRMYDEGVRDTLYSAIERVVRAECAAQSTTVDPTFRYFAHGPLTSNNSGVFATVRPQLDAHFGDQSTQAEKWTASEDFSNIPDAFQAPYLFWTVGCTPQQQWEAACEAGTIDQDIPVNHSGTFLPDFVPTVTSSTQAAIIAVLSYLSPDTPPQSDLAHN

SEQ ID NO: 52694 - protein, 398 aa, Ralstonia metallidurans CH34
MKQLQDAYIVAATRSPIGKAPKGAFKNTRPDDLLATILQAAVAQVPSLDPALIEDAIVGCAIPEAQQGLNVARIGALLAGLPNTVGGITVNRFCASGLSAVAMAADRIRVGESDVMIAAGVESMSMVPMMGNSPSMSPSIFERDENIGIAYGMGLTAEKVATQWKVSREDQDAFSLASHQKAIAAQQAGEFKDEITPIEVVERFPDLASGQINVKTRTISLDEGPRPDTSVEGLGKLRAVFANKGSVTAGNSSQTSDGAGALILVSEKILKQFNLVPRARFVSFAVRGVPPEIMGIGPKAAIPAALKAAGLTQDQIDWIELNEAFAAQSLAVMRDLELDPAKVNRMGGAIALGHPLGATGAIRSATVVHALRRHNMKYGMVTMCVGTGMGAAGIFERV

SEQ ID NO: 52695 - protein, 473 aa, Corynebacterium diphtheriae NCTC 13129
MERRTKIVCTLGPAVASREGILGLVKAGMNVARMNMSHGDHADHEKNYQWVREATDETGRAVGILADLQGPKIRLGRFIDGATVWENGEIVRITVDDIEGTHDRVSTTYKNLAKDAKPGDRLLVDDGKVALRCVEVDGNDVVCEVVEGGPVSNNKGVSLPGMDISVPALSEKDIADLRFALNLGVDIIALSFVRSPADVELVHAIMDEEGRRCPVIAKLEKPEAMDALESIVLAFDGIMIARGDLGVECPLEQVPLFQKRAIQIARENAKPVIVATQMLDSMIENLRPTRAEASDVANAVLDGADAVMLSGETSVGIDPANVVRTMSRIVSYAEIDGRVPNLAHIPRTKRGVISYSARDIAERLNAKALVAFTSSGDTAKRVARLHSQLPLLVFTPHQEVRSQLALTWGVETFLTDEVKDTDEMMRTIDEQLLALDTYSEDDMIVLVAGTPPGVQGNTNMIHVHHLGEDLNGL

SEQ ID NO: 52696 - protein, 605 aa, Oryza sativa (japonica cultivar-group)
MELALVGNPSNGVAKPSCNSVGSLPVVSSNAVINPPVTSAAGATLGRHLARRLVQIGATDVFAVPGDFNLTLLDYLIAEPGLKLIGCCNELNAGYAADGYARARGVGACAVTFTVGGLSVLNAIAGAYSENLPVICIVGGPNSNDYGTNRILHHTIGLPDFSQELRCFQTITCYQAVINNLDDAHEQIDTAIATALRESKPVYISVGCNLAGLSHPTFSREPVPLFISPRLSNKANLEYAVEAAADFLNKAVKPVMVGGPKIRVAKAKKAFAGIAESSGYPFAVMPSAKGLVPEHHPRFIGTYWGAVSTTFCAEIVESADAYLFAGPIFNDYSSVGYSLLLKREKAVIVQPDRVVVGNGPAFGCILMTEFLDALAKRLDRNTTAYDNYRRIFIPDREPPNGQPDEPLRVNILFKHIKEMLSGDTAVIAETGDSWFNCQKLRLPEGCGYEFQMQYGSIGWSVGATLGYAQAAKDKRVISCIGDGSFQMTAQDVSTMLRCGQKSIIFLINNGGYTIEVEIHDGPYNVIKNWDYTGLIDAIHNSDGNCWTKKVRTEEELIEAIATATGAKKDCLCFIEIIVHKDDTSKELLEWGSRVSAANSRPPNPQ

SEQ ID NO: 52697 - protein, 605 aa, Oryza sativa (japonica cultivar-group)
MELALVGDPSNGVAKPSCDSVGSLPAVSSKAVIHPPVTSAAGATLGRHLARRLVQIGATDVFAVPGDFNLTLLDYLIAEPGLKLIGCCNELNAGYAADGYARARGVGACAVTFTVGGLSVLNAIAGAYSENLPVICIVGGPNSNDYGTNRILHHTIGLPDFSQELRCFQTITCYQAVINNLDDAHEQIDTAIATALRESKPVYISVGCNLAGLSHPTFSREPVPLFISPRLSNKANLEHAVEAAADFLNKAVKPVMVGGPKIRVAKAKKAFAGIAESSGYPFAVMPSAKGLVPEHHPRFIGTYWGAVSTTFCAEIVESADAYLFAGPIFNDYSSVGYSLLLKREKAVIVQPDRVVVGNGPAFGCILMTEFLDALAKRLDRNTTAYDNYRRIFIPDREPPNGQPDEPLRVNILFKHIKELLSGDTAVIAETGDSWFNCQKLRLPEGCGYEFQMQYGSIGWSVGATLGYAQAAKDKRVISCIGDGSFQMTAQDVSTMLRCGQKSIIFLINNGGYTIEVEIHDGPYNVIKNWDYTGLIDAIHNSDGNCWTKKVRTEEELIEAIATATGAKKDCLCFIEIIVHKDDTSKELLEWGSRVSAANSRPPNPQ

SEQ ID NO: 52698 - protein, 543 aa, Borrelia burgdorferi
MILDDGFQSDEEDIDIDVKLDDCDEEDISVKDDLGSGYIKGNVLKDSHSEDPIKLYLKEIGKEFLLTGNQEVELAKQMDSGESIIENILKNEGLVIENYYNLVNTIYSRMEREEFFKREKDKDKESSPDYYNKKKRIASFYKIPLKPIQDRLISYVDNKHRVYDLGGDIFEKNLKKERLALKELLRDIPLYQEELRIFSDDYIDSANKIKDLQRQQRIILSRLKIEKIRDLRVLGRDLTIAEKKIEIEKSLKLKEDAIKEQITEAQLAQKELERIEMYYEYPTDKIISMSEEIAKGKQMMQHAKDQLIKANLRLVVSIAKKYANRGLHFFDLVQEGNIGLIKAVEKFEYKRGFKFSTYATWWIRQAITRSISDQARTIRVPVHMIEQINRLNRETRYLIQVLGKDPTDEELSDRLGWELKKVKTVKSVSREPVSLETPIGEEEDSVLSDFIEDKAIKNPANHTSFVVLQDQIRAILGTLPEREQEVVKMRFGLEDGYSLTLEEVGLHFNVTRERIRQIESKALRRLKNPKKTQKLKDYLEDLN

SEQ ID NO: 52699 - protein, 310 aa, Kluyveromyces lactis NRRL Y-1140
MTLKSTVDDYTKEKKAGEGTYAVVYLGTKKSTGRSIAVKEIKTSQFKDGLDMSALREVKFLQELKHVNVIELVDVFMANDNLNLVLEFLPADLEIIIKDTSIMFSPADIKSWILMTLRGVHHCHRNFILHRDLKPNNLLLAPDGQLKIADFGLARLMASPQEILTSNVVTRWYRAPELLFGAKHYTSAVDIWSVGVIFAELMLRIPYLPGKDDVDQINVTFRALGTPTDADWPEVSSFSNYNKIQIYPPPSREELRRRFIAATENALELISGMMIMNPKKRWDAVKCLQSQYFQELPEPTLPQDLPKLNK

SEQ ID NO: 52700 - protein, 214 aa, Pseudomonas fluorescens PfO-1
MHDLQDLIDNNERWADAITKEDPDFFAKLARQQTPEYLWIGCSDARVPANEIVGMLPGDLFVHRNVANVVLHTDLNCLSVIQYAVDVLKVKHILVTGHYGCGGVRASMQDRQFGLIDGWLRSIRDLYYEKREELARLPTEEEQVDRLCELNVIQQVANVAHTSIIQNAWHRGQSLSIHGCIYGIKDGRWKSLNTTISGFEQLPPQYRLRPVGAP

SEQ ID NO: 52701 - protein, 526 aa, Mannheimia succiniciproducens MBEL55E
MIISIALLTISAYNTAQFFLHGCFLVFSSNMKKGYLNQTNKIFTEYLMSRRLRRTKIVCTMGPATDKGNNLEKIIAAGANVVRMNFSHGTPEDHIGRAEKVREIAHKLGKHVAILGDLQGPKIRVSTFKEGKIFLNIGDKFILDAEMPKGEGNQEAVGLDYKTLPQDVVPGDILLLDDGRVQLKVLATEGAKVFTEVTVGGPLSNNKGINKLGGGLSADALTEKDKADIITAARIGVDYLAVSFPRSSADLNYARQLAKDAGLDAKIVAKVERAETVETDEAMDDIINAADVIMVARGDLGVEIGDPELVGVQKKLIRRSRQLNRVVITATQMMESMISNPMPTRAEVMDVANAVLDGTDAVMLSAETAAGQYPAETVAAMAKVALGAEKMPSINVSKHRMNVQFESIEESVAMSAMYAANHMRGVAAIITLTSSGRTARLMSRISSGLPIFALSRNESTLNLCALYRGVTPVHFDKDSRTSEGAKAAVQLLKDEGFLVSGDLVLLTQGDASSSSGTNLCRTLIVE

SEQ ID NO: 52702 - protein, 605 aa, Salmonella enterica subsp. enterica serovar Typhi Ty2
MLNAWHLPVAPFVKQHNDKLTITLWLSGENPPSRVTLRSEFDNEEISLAMRKQRRQPQPGVTAWRATLNIALGQPRRRYSFKLLWHDRQRWFTPQGFSCFPPARLEQFAVDVPDSGPQWVADQIFYQIFPDRFARSATREADQDRVYYHHAAGQEIVLRDWDDPLTPQAGGSTFYGGCLNGICEKLPYLKKLGVTALYLNPVFTAPSVHKYDTEDYRHVDPQFGGDRALLRLRRETQAQGMRLVLDGVFNHSGDSHAWFDRHNRSTGGACHHPDSPWRDWYSFSPQGVALDWLGYPSLPKLDYQSETLVDEIYRGEDSIVRHWLKAPWNMDGWRLDVVHMLGEAGGARHNLQHVAGITRAAKEAQPEAYIVGEHFSDARQWLQADAEDAAMNYRGFTFPLWGFLANTDIAYEPQHIDARTCIAWMDNYRAGLSHQQQLRMFNQLDSHDTARFKTLLGKDAARLPLAVVWLFTWPGVPCIYYGDEVGVDGANDPMCRKPFPWDERKQDGNLLALYQRMAKLRQSSLALRRGGCQALYAEGDVVVFVRVYQQQRALVAINRGEACEVALEALPLLNVAGWQCKTGSGDIREGRLSLPAISATVWMNR

SEQ ID NO: 52703 - protein, 461 aa, Streptomyces coelicolor A3(2)
MSNSTTAKAPRQPADASLSHGLKQRHLSMIALGGVIGAGLFVGSGAGIAAAGPSIVVAYTVSGLLVMLVMRMLGEMSAAYPSSGSFSAHAERAIGPWAGFTAGWAFWVLLCTAVGLEGIGAAQIVHGWLPGTPEWAWVALFMVVFCGTNLAAVKNFGEFEFWFAALKVGAISLFLVLGVLAICGVLPGTDSPGTSHLGDFLPHGGNGLIIGLLASVFAYGGLETVTIAAAESENPVRGVASAVRTAMWRIALFYIGSMAVIVTLVPWDSPEVVEKGPYVAALDELGIPGAGQLMNIVVLVALLSAMNANIYGASRIGYSLVERGQGPKVLGRVSGGVPRVAVLVSSLFGFGCVLLSYWRPDDVFSWLLNMIGAVILVVWIFIAAAQLRLRRRLEREAPEKLVVRMWAFPWLTWVALAGMAAVFVLMAREPDTRVQLYSTGGMTLVLAAVGYARQRRGAARD

SEQ ID NO: 52704 - protein, 127 aa, Actinobacillus pleuropneumoniae serovar 1 str. 4074
MAYSEKVIDHYENPRNVGTFDKEAADIGTGMVGAPACGDILRLQIKVNDQGIIEDARFKAYGCGSAIASSSLITEWVKGKSLEEAGAIKNSDIAEELELPPVKVHCSILAEDAIKAAIADYKEKQAK

SEQ ID NO: 52705 - protein, 518 aa, Glycine max
  misc_feature (332)..(332): Xaa can be any naturally occurring amino acid
  misc_feature (351)..(351): Xaa can be any naturally occurring amino acid
  unsure (1)..(518): unsure at all Xaa locations
MAVANSNSSNEPCASYNCYKVAGLTETILDISHISNLKDRYILGEQLGWGQFGVIRTCSDKLTGEVLACKSIAKDRLVTSDDLKSVKLEIEIMARLSGHPNVVDLKAVYEEEGFVHLVMELCAGGELFHRLEKHGWFSESDARVLFRHLMQVVLYCHENGVVHRDLKPENILLATRSSSSPIKLADFGLATYIKPGQSLHGLVGSPFYIAPEVLAGAYNQAADVWSAGVILYILLSGMPPFWGKTKSRIFEAVKAASLKFPSEPWDRISESAKDLIRGTLSTDPSRRLTAREVLDHYWMECNQTNPEQLSECKIRNCEEWNAGGSSFSASLXPGVRTSVLVPAHLLVTLNXPTFTCRSSFSSFLVEPVTPCLVSGGFSFKSAGDSPDLEFCSPVPSMLSFSFLSPSSVVEQKSCKLECSANMADVNAIAGETNLGKLLMLQDSPLCVGREVKETDRKPVEAKRASGMNGHKVLGIHSKRNRTIGLGECEQLDLMVTESVIRWSSCTQLPTSLRSSLVC

SEQ ID NO: 52706 - protein, 456 aa, Salmonella enterica subsp. enterica serovar Typhi Ty2
MESNNKLKRGLSTRHIRFMALGSAIGTGLFYGSADAIKMAGPSVLLAYIIGGVAAYIIMRALGEMSVHNPAASSFSRYAQENLGPLAGYITGWTYCFEILIVAIADVTAFGIYMGVWFPAVPHWIWVLSVVLIICAINLMSVKMFGELEFWFSFFKVATIIIMIVAGIGIIVWGIGNGGQPTGIHNLWSNGGFFSNGWLGMIMSLQMVMFAYGGIEIIGITAGEAKDPEKSIPRAINSVPMRILVFYVGTLFVIMSIYPWNQVGTNGSPFVLTFQHMGITFAASILNFVVLTASLSAINSDVFGVGRMLHGMAEQGSAPKVFAKTSRRGIPWVTVLVMTIALLFAVYLNYIMPENVFLVIASLVTFATVWVWIMILLSQIAFRRRLPPEEVKALKFKVPGGVVTTIAGLIFLVFIIALIGYHPNTRISLYVGFAWIVLLLIGWIFKRRRDRQLAQA

SEQ ID NO: 52707 - protein, 482 aa, Zea mays
  misc_feature (249)..(249): Xaa can be any naturally occurring amino acid
  unsure (1)..(482): unsure at all Xaa locations
MVSSEMTSVTVTRAQGSKLFRGKILLPGGSSDVVPSENVEFDFSDVFGPSAVHTHTEVSVLTLGSPAPVAESNDEVYNDPDVIVKRSHSLVGPSSLVSQSLPFSKLTLHKKDSSLEISECLSKEKQINQGSFSDDEFDDVKKENEGVGLDDFEVLKLVGRGAFGKVYQVRKKGTSEIYAMKVMRKDKVVEKNHTEYMKAERDILTKVDHPFVVQLRYSFQTKYRLYLVLDFINGGHLFFQLYHQGLFRXEELARIYAAEIVSAVAHLHANGIMHRDLKPENILLDADGHAMLTDFGMAKEFDENTRSNSMCGTVEYMAPEIFQGRGHDKAADWWSVGILLFEMLTGKPPFVGGNRCKIQQKIVKEKIKLPTYLSSEVHSLLKGLLHKEAGRRLGSGPGGSDEIQKHKWFKSVNWKRLEARQIEPSFRPNVAGKTCIANFDKCWTNMSVLDSPVASPVAANSNFVGYSYVRPAPFLQKPSPLG

SEQ ID NO: 52708 - protein, 154 aa, Prunus avium
GMQIFVKTLTGKTITLEVESSDTIDNVKAKIQDKEGIPPDQQRLIFAGKQLEDGRTLADYNIQKESTLHLVLRLRGGMQIFVKTLTGKTITLEVESSDTIDNVKAKIQDKEGTPPDQQRLIFAGKQLEDGRTLADYNIQEESTLHLVLRLRGGF

SEQ ID NO: 52709 - protein, 698 aa, Magnaporthe grisea
MSPLWKTAAAIAVAASGSLVNAVYINGSIITPCDSLIYCRGELLKEVELAHPFADSKTFVDMPTIKPVDEVIEAFNKLQKPLSNNTELQDFLRENFAQAGGELEEVPNSELETDPVFLDKLDDTVIREFVEKVIDIWPSLTRRYKGPSNCEACADSFIPVNRTFVVAGGRFREPYYWDSYWILEGLLRTGGAFTNISKNTVENFLDLVETIGFVPNGARIYYKNRSQPPLLSQMVRIYVEHTNDTSILGRAVPLLIKEHEFFINNRSIDVEASNGKTYRLQRYAVTNTQPRPESYREDYITASNRSYYSPSGIIYPESHQLNESEKAVLYSHLASGAESGWDYTSRWLSTPSDAVRDNYFPLRSLNTNNIVPVDLNSILYANEVAIAEFLNRTGNSTGASDWMDLAKQRSEAMYALMWNETLWSYFDYNMTSKTQNRFIPVDEDAVSIETNNAPAGQQVFFHVAQYYPFWTGAAPRSLKNNPLAVLRAYERIDAYLDIKRGAIPATNLKTGQQWDEPNVWPPLMHILMEGLTRVPATFGEDDVAWTEIQDLALRLGQRYLDSTFCTWYATGGSTSETPQLQGLNAEDKGIMFEKYGDNSTNVAGSGGEYEVVEGFGWTNGVLMWVADTFNNKLTRPDCGNITAANVHSDGSQARKRGEMWSALEMHPYDAAWTKEFGARKVRRDKAEARALGNVMGGV

SEQ ID NO: 52710 - protein, 462 aa, Zea mays
MDRLPESTRSMRKYASEAGGLRAARQGPHGRSLTARTAHSMSTTALRTKSKSAASLLRRVPFAPLRPVLANLQEVFLGTKLAVLFPAVPLAIAAQCAHFGQVWVFSLSLLGLIPLAERVSFLTEQIAIYTGPTVGGLLNATCGNATELIIALFALMGGQIEVVKCSLLGSVLSNLLLVLGTSLFCGGVVNLGSDQPYDRTQADVSTGLLILGVLCQSLPLMLRYAVGAGEHSVAAATTVLDLSRACSVVMLLAYVAYLFFQLKTHAQLFEPQEVDDGCEAEEDEQAVIGFASGFFWLAFNTVLIAILSEYVVGTIEPTSKSWGLSVSFISIILLPIVGNAAEHAGAIIFALKNKLDITLGVALGSATQISMFVVPLSVIVAWIAGIQMDLDFKLIETGSLFVSVIVTAFTLQDGSSHYLKGILLLLCYIVIGACFFVTRQPASNNNGAGLSLPTGTLSAQAA

SEQ ID NO: 52711 - protein, 318 aa, Magnetospirillum magnetotacticum MS-1
MHVHNLSSWQHSHHFQSGLEASAERRTKIVVALTIAMMVAEIAAGTIFNSMALLADGWHMSTHAGALGIAAFAYAFARSHADDQRFTFGTGKVGTLGGFTSAIILCMVALLMVWESANRLMTVQAIAFDEALMVAVIGLVVNVVSAGILGGHGLGDDHDHCGHHHDHDHHRDHHDHNLQAAYIHVLADVLTSVLAIAALLLGKYLGWWWMDPMMGLVGAAVIGKWAWGLLRKTGSVLLDHSDDRELPEEVRAAIEGDADNRLSDLHLWQIGPGHWGAIVSLVTRTPREPGHYKTLLAEVHELSHVTVEVHPCDGASCG

SEQ ID NO: 52712 - protein, 222 aa, Brassica napus
  misc_feature (193)..(193): Xaa can be any naturally occurring amino acid
  misc_feature (213)..(213): Xaa can be any naturally occurring amino acid
  unsure (1)..(222): unsure at all Xaa locations
MSLKALDYESLNENVKNCQYAVRGELYLRASELQKEGKKIIFTNVGNPHALGQKPLTFPRQVVALCQAPFLLDNPNVGMIFPADAIARAKHYLSLTSGGLGAYSDSRGLPGVRKEVAEFIQRRDGYPSDPELIFLTDGASKGVMQILNCIIRNQKDGILVPVPQYPLYSATISLLGGTLVPYYLEETDNWGLXDVNNLRQSVAQARSQGITVXMVIIKPRNP

SEQ ID NO: 52713 - protein, 649 aa, Arabidopsis thaliana
MRRKTKKIESKMHALKIERLIESASVQIPVLHSRVYYFPQGHVEHCCPLLSTLPSSTSPVPCIITSIQLLADPVTDEVFAHLILQPMTQQQFTPTNYSRFGRFDGDVDDNNKVTTFAKILTPSDANNGGGFSVPRFCADSVFPLLNFQIDPPVQKLYVTDIHGAVWDFRHIYRGTPRRHLLTTGWSKFVNSKKLIAGDSVVFMRKSADEMFIGVRRTPISSSDGGSSYYGGDEYNGYYSQSSVAKEDDGSPKKTFRRSGNGKLTAEAVTDAINRASQGLPFEVVFYPAAGWSEFVVRAEDVESSMSMYWTPGTRVKMAMETEDSSRITWFQGIVSSTYQETGPWRGSPWKQLQITWDEPEILQNVKRVNPWQVEIAAHATQLHTPFPPAKRLKYPQPGGGFLSGDDGEILYPQSGLSSAAAPDPSPSMFSYSTFPAGMQGARQYDFGSFNPTGFIGGNPPQLFTNNFLSPLPDLGKVSTEMMNFGSPPSDNLSPNSNTTNLSSGNDLVGNRGPLSKKVNSIQLFGKIITVEEHSESGPAESGLCEEDGSKESSDNETQLSLSHAPPSVPKHSNSNAGSSSQDPEAWNDLYFSSVCVCFDSTIIYNSVVSAIDFSLAFLCHVTIPFFTFFLFFLSISQTHLMNISLSSNR

SEQ ID NO: 52714 - protein, 690 aa, Oryza sativa (japonica cultivar-group)
MNPYFIGFAIPFLASLLFTKRKGEKKRGVPVDVGGEPGYVIRNHKFERPVETHWEGVSTLAELFEQSCEQYVYMPLLGTRKLISREMEAARDGRSFEKLHLGQYEWKSYADAFKTVCNFSSGLVRIGHQRDERVAIFADTRAEWQIALQACFRQSITVVTIYSSLGEGALCHSLNETEVTTVICGRKELKKLLDISGQLDTVKHVIYVNEEGVSSEVSLAQKCTSWRVESFEEVERLGLETPVEAKLPLPSDTAVIMYTSGSTGMPKGVMMSHRNVLAVVSAVMTIVPALGKKDVYLAYLPLAHILELAAETVMSAVGASIGYGSPLTLTDTSNKIKKGTQGDASALKPTLMTAVPAILDRVRDGVRKNVDAKGGAAKKLFDIAYSRRLAAINGSWFGAWGLEKHLWDMLVFQKVEHLCLEILRDLSIYALGFGLCCCRAPIGQGYGLTETCAGGTFSEYDDNSVGRVGAPLPCSYIKLIDWAEGGYLTNDSPMPRGEIVIGGPNVTKGYFKNEAKTNEVYKDDERGMRWFYSGDIGRLHPDGCLEIIDRKKDIVKLQHGEYVSLGKVEAALSVCPYVDNIMIHADPFHNYCVALVVVAHSELKSWASQQGITYSDVSDLCEKQETVKEVLQCLAKAAKQARLEKFEIPAKVKLVPEPWTPESGLVTAALKLKREAIKKAYEDDLAALYS

SEQ ID NO: 52715 - protein, 395 aa, Ustilago maydis 521
MQNPFGLRSESAAVHEPILQDFAPQPPSTKLPWSTHEQRPVGLAIVYACCRVPQEDSIWHKHTHDSFFCIFYAGQPADSFLIHSHIPYLSLGNRLYHHRFHRHLVHDLAQERFWMYTAFPCSSLFSVARRHCNPFNVVSSRSFATTTRVDCSTHLASSFPATTRQSHSASSSTCTSSSKMQPVAQLVSKNKAWSADFLAKKPELAAHLAQRQTPKMLWFGCADSRVPETTICDAEPGDFFVSRNIANQFRLDDTAANALLTFAVQSVGIEHVCVVGHSSCGGVLAAIGGATTPPSEKDIESSALLQHLIPLFKLAKEVCEANPGLSNDELAFKVVSASVKQQIDNIISTSIIQDNWNGVTSPLSGKVMNKVQVHGLFYDIGKQELIDLDLSRSAP

SEQ ID NO: 52716 - protein, 447 aa, Burkholderia mallei ATCC 23344
MTSRDERLHRGLEERHINLMALGATIGVGLFLGSATAIRAAGPAILLTYILGGVAIFLIMRALGEMAIDNPVAGAFSRYARDYIGPLAGYLTGWTYWFMWIVTCMAEITAVGVYMHMWFPDVPNWIWTFAALIVMGAVNFIAVKLYGEFEFWFALIKIVTIVLMIAGGALMIVAGVGNGGVPTGVSNLWAYGGFLPNGWPGVVDALPIVMFAYLGVEMLGLTAGEARNPEKSLAKAVNSVFWRVVIFYVGALFVIMSVYPWNQIGTQGSPFVMTFSRLGIPAAAGIINFVVLTAALSSCNSGIFSTARMLFNLAEQGQAPERLASVNRRGVPVHGVLISVALLFVGVVLNYFAPQKVFVWLTSVSTFGAIWTWCVILIAQLRFRRRVSAERLARLPLRVPCYPLSSFVALAFLAFVVVLMAFSPDTRVALVIGPLWIAALTVYYYAS

SEQ ID NO: 52717 - protein, 597 aa, Ustilago maydis 521
MSTTLSNKLVRWASSHPFVAAFLALVLVSTLYLAWKRASAKPSVWLNLPGPERTSFLTGYSRDPKKKLGVKNPTAPDREPIIGDDGVDITETPGVAIARLYDEYQCDHLVFPRPIGGELLITRDAATMNHILNDSYNYTRSTAGTKATKIIIGNGVVAVFGDEHKKQRKMLAPAFSVDSLRGLMPIFTQATAQMMDRFGKDTSLEKRWGRDVKDSVKWFGRVTLDIIGRAGFDYDFGAVEQGPNGLAVRSTFHDAMTSTMNVSPIDAVVGAFMFFVVPSLLYILPLTENVRKLREMRSELIKCSHKIVAAKAKQIRKELEAGVDAKETFAGKKDILHLLMRANMSPEIRPQDRLTDETLAGQIVTFIFAGHETSGNTMSWCTFFLALDVEYQQKLRQHIQKALKEMGKDGDAITELTWADVNSEEMRPLDLCIQETLRLRPPITTTFRYSTKDDQLPVTTPFKTKDGRTLSTIPITAGQEIAISVTGNNMDPKYFGADPHRFRPDRWNNLPDLHAKSKLPSPYGSFVFNGGPKVCIGSKFAMTEMKVILVNVLAKYRIEPVEGLKYKSVEAVVQRPAVIGFEKEGSQLPLRFVHDPL

SEQ ID NO: 52718 - protein, 374 aa, Methylococcus capsulatus str. Bath
MKPIQESLFPRRLWTATATLLLGFGMVAGGFQAASARDVAPRPISPRGELALEERATVELFEKSKNSVVYISTLQQVMDPWTRNVLSIPRGTGSGFIWDEAGHVVTNYHVVEGASGATVKLADGRDYRAALVGVSKAHDLAVLRIDVGQGIPSPLPIGVSHDLKVGQKVFAIGNPFGLDWSLTTGIVSALDRSLTEETGVTIEHLIQTDAAINPGNSGGPLLDSAGRLVGINTAIYSPSGAFSGVGFAVPVDTVNRVVPQLIGRGQYIRPALGIAVDEGLNQRAVQRLGVTGVLVLKVNPGSAAEAAGLKGATLLPDGRLIPGDIIVAVEGRPVDSVSKLSALLDDYQIGQKVRLSVRRGDTEMDIAVQLQAGS

SEQ ID NO: 52719 - protein, 571 aa, GIBBERELLA ZEAE PH-1
MRDYSLNSEEPGVLVPESQINHDEEDVVRRREDQPLLHAPDGETWKPPRGFTWIQLAIMSNVFLYGLDSTITAATYAVISSEFDAANTASWLTTSYLITSTAFQPLYGRVSDIFGRRLCFFISTITFALGCLGCAVASNVVFLNVMRALTGFGGGGLMTMATIVNSDMVPFRKRGMYQALQNGIYGFGAISGACFGGSIADHIGWRWCFLLQVPVSVAALIIGALVVSDQTTYSVSESNLDTVWKRVDFTGSLLMVMAVSVQLLGLSLGGNELPWSSPWVIGCLVGSIALFVLFFLVEAKTSAIPVIPLRLLQGRLPVSTQFANVCAGMAAYGYLFMLPLFFQVVLLDSATTAGARLAIPSLATPIGGVIAGVVMSRWGKLLTLVRIGAFLMVLGNGLVTSLRFHDSKWKYFVYVFPANLGQGIIYPGILFTSLASFSHSDHAVTASTVYLVRSMGTVWGVSTTSAIVQTTLSARLPEALSNVPDKWSIIEQIRHSVDYIHELPLDQQLKLSLQRACGELALNEHLVEYPAYVYPANFNRHLRTEARRVSPKVKNSFQKSDGIHRQFPPSL

SEQ ID NO: 52720 - protein, 410 aa, Campylobacter jejuni RM1221
MRNLLENIKKNSQKLLNLTPKDKEKIILKLAQILRENFKIILEANKKDMANFTKSGAMKDRLLLDEKRILALCEGLEKIAYIEDPIGKISKGWKNYAGLNIQKISIPLGLICVIYEARPSLSAEIAALMIKSSNACVFKGGSEAKFTNEAIFTLVNKVLKEFDLQDCFAMFTQRDEILQILAFDDLIDVIIPRGSSNMIQEIANNTKIPLIKQNKGLCHAFVDQSANLDMALKIILNAKCQRVSVCNALETLLIHEKIAKNFISLLIPEFEKFKVKIHAHENTLAYFNNSNLEIFKANENTFDTEWLDFALSVKLVKDCDEAIEHINKHSSLHSETIISNDASNIAKFQRLINSSCIYANASTRFSDGGEFGFGGEVGISTSKLHARGPMGIEDICTYKYIINREGQIRE

SEQ ID NO: 52721 - protein, 574 aa, Caulobacter crescentus CB15
MARPLLDDSIDLIASTGRQARPARLGMAVLVAGFLGFNVSAAIAIVWFAAAMVAEVYGLGVTRLSRRLNLSPVLRRLGYVTVVIVMVGVWTALTLVLWTSGNPALQWAAICLAAGQLIHAQSVTFRAPVLFAIDVGMPSTSLIVMPILTGGFAPVQIATMMTAVALMLLYTFTSATANNRRIAALEAAEAQALKASEAKSAFLAMISHEIRTPMNGVLAMTDALSRADLGPDQARQTALLKRSGEDLMTLLNDVLDISRIEAGKLEIECQPFDLPELLGDLRALWTPAATDKGLDLVLTIAPGLDAYRLGDPTRLRQILGNLVSNAVKFTRSGGVALSARPGEAPGAVVFDVADTGIGMTPEQQGRLFQSFSQADASIARRFGGSGLGLSICSQLATLMDGAITVDSDLGSGSTFRLTLPLPVTERPAAPAPAEPAADTAETPATPDSLAGLTVLVADDHPVNQAVARAILEAVGARVAVADNGEAALASLKSAPADLVLMDLHMPGLGGRETVRRIRRGEGGDPAVPIIALTGEALGEDPAAWRAEGFDAVQQKPVVARDLLAAAARLTARTA

SEQ ID NO: 52722 - protein, 904 aa, Xanthomonas oryzae pv. oryzae KACC10331
MNEYRSSLVFATPDLPLRDDVRRLGALVGDLLAEQVSAEFLDEIERVRTTAISRRESDAPPSTLSEQLTGREPRDAEALVRAFSTYFQVVNIAERVHRIRRRREYQRSGTDTPQPDGLHDALRRLKAQGVTLDELSQWLPRIDVEPVFTAHPTEAVRRALLEKEQLMVASLVDNLDGMRTPNERTSDAARFRMALTASWQTADSSPVRPTVGDEREHVGFYLTQVLYRVIPVMYETLEHAIEETYGSVPALPRLLRFGTWVGGDMDGNPNVDANTIAGTLDAQRRAVLDRYQKELWQLASLLSQSTTLVQVSPELMTQLERYRALLPDAAARSRPRHGDMPYRLLNDLMRARLQATLDDADGAYTAPSELEDDLQLILDSLQANKGLHAGWFAVRRLLWRVRSFGFHLARLDVRQESSVHARAVADALGQTDWDAQDATRRAAVLGPYACGQEALPRVQDEGNARLDAVFAALADARTRHGADALGSYIISMAHNRADVLTVLALARRGGLVDAAGAVPLDIVPLFETVDDLRGGTGTVQDLLADPVYRQHLAARGDTQMVMLGYSDSGKDGGIAASRWGLQRAQVELLEAAADLGVRLTFFHGRGGSIARGGGKTSRALDAAPRGSVDGRLRVTEQGEVIHRKYGIRALALRSLEQMTGAVLLSSLRPRAPEPREARWRPVMDLVAERSTVAYRAFVAAPEFMQYFRLATPIDVIERMTLGSRPSRRLGQDAALSNLRAIPWVFAWSQARAVIPGWYGVGSGLQAAVDAGHEDSLREMAQDWPFFRTFLDDVAMVLSKGDLNIAELFSRLSGDLHTRFFPLIRDELALTKGWVKALLQQQSLLQHDPRLALSIRLRNPYIDPISVLQVDLLQRWRATDGEDEALLRALVACVNGVSQGLQNTG

SEQ ID NO: 52723 - protein, 151 aa, Clostridium acetobutylicum ATCC 824
MFGMVPFRRNNNGLMRREDFFDKMFDNFFSDDFFPTTTFNGNAGFKVDIKEDDDKYTVAADLPGVKKDNIELQYENNYLTINAKRDDIVETKDDNNNFVRRERSYGELRRSFYVDNIDDSKIDASFLDGVLRITLPKKVKGKDNGRRIDIH

SEQ ID NO: 52724 - protein, 315 aa, Zea mays
MPTANVRAAQPSADRRLSTLVRHLLPSSPRTSAATATSADSSLQPFPTMASPSVFAGIAQGPEDPILGVTVAYNKDPSPVKVNLGVGAYRTEEGKPLVLNVVRRAEQMLIQNESRVKEYLPITGLADFNKLSAKLIFGADSPAIQENRVATVQCLSGTGSLRVGGEFLARHYHERTIYIPQPTWGNHPKVFTLAGLTARSYRYYDPATRGLDFQGLLEDISSAPSGAIVLLHACAHNPTGVDPTLEQWEQIRQLMRSKALLPFFDSAYQGFASGSLDKDAQSVRMFVADGGELLMAQSYAKNMGLYGERVGALAS

SEQ ID NO: 52725 - protein, 216 aa, Thermococcus kodakarensis KOD1
MAFDRQKLVEAVKEAKARAKPRNFTQTVEMAVNLKDVDLRKPENRFKLEVVLPHGRGKEPKIAVIADGAVAEAAKKLGLDVISGEELEELAKSPRQARKLAKKYDFFIAAAPLMPKIGRYLGRYLGPRNKMPVVVPPTMTNLEPIVEKLKKTVRIQLKNNPVVHAPIGTEDMDDEKLAENAEAVLNAIINKLERGENQVKSVYIKTTMGPAVKVER

SEQ ID NO: 52726 - protein, 435 aa, Ralstonia metallidurans CH34
MSSAAPTQNVSNGHTLPSYLNADNLGPWGIYLQQVDRVTPYLGSLARWVETLKRPKRAMIVDVPIELDNGTIAHFEGYRVQHNLSRGPGKGGVRFHQDVTLSEVMALSAWMSVKNAAVNVPYGGAKGGIRVDPRTLSHGELERLTRRYTSEINIIIGPSKDIPAPDVNTNAQVMAWMMDTYSMNSGSTATGVVTGKPISLGGSLGRHEATGRGVFVVGSEAARNLGMDVKGARVAVQGFGNVGAVAAKLFHEAGATVVAVQDHRTTLFDPAGLDVPKMMEYASHSGTIEGYRAEVISTEQFWEVDCDILIPAALEGQLTASNAPKIKAKLVIEGANGPTTPEADDILRERNILVCPDVIANAGGVTVSYFEWVQDFSSFFWTEEEINERLVRIMQEAFRAIWQVAQDNKVTLRTAAFIVACTRILQAREMRGLYP

SEQ ID NO: 52727 - protein, 447 aa, Solanum tuberosum
MREILHIQGGQCGNQIGAKFWEVICAEHGIDSSGRYQGDSDLQLERLNVYYNEASCGRFVPRAVLMDLEPGTMDSVRSGPFGQIFRPDNFVFGQSGAGNNWAKGHYTEGAELIDSVLDVVRKEAENCDCLQGFQVAHSLGGGTGSGMGTLLISKIREEYPDRMMLTFSVFPSPKVSDTVVEPYNATLSVHQLVENADECMVLDNEALYDICFRTLKLTTPSFGDLNHLISATMSGVTCCLRFPGQLNSDLRKLAVNLIPFPRLHFFMVGFAPLTSRGSQQYRALTVPELTQQMWDAKNMMCAADPRHGRYLTASAMFRGKMSTKEVDEQMINVQNKNSSYFVEWIPNNVKSTVCDIPPTGLKMASTFIGNSTSIQEMFRRVSEQFTAMFRRKAFLHWYTGEGMDEMEFTEAESNMNDLVSEYQQYQDATAEEEGYDYKDVGDEPLES

SEQ ID NO: 52728 - protein, 226 aa, Brassica napus
  misc_feature (18)..(18): Xaa can be any naturally occurring amino acid
  misc_feature (46)..(46): Xaa can be any naturally occurring amino acid
  misc_feature (70)..(70): Xaa can be any naturally occurring amino acid
  misc_feature (170)..(170): Xaa can be any naturally occurring amino acid
  unsure (1)..(226): unsure at all Xaa locations
SILPKYKLGKTLCIGSFXAKVKIGEHLLTGHKVAIKILNRRKIKTXQIEDKVRREIKILRLFIHPHVIHXYEVIESPGDIYLVMESVKSAELFDYIVEKGRLQEDEGRNFFQQIISGVEYCHRNMVVRRDLKPENLLLNSMCNIKIADFWLSNVMRDGHFLKTSCGSPNXSCSQIISGKLYSGPEVDVLSCGVIFYALLCGTLPFDDENIPNLFKKIKVLYFDSAQ

SEQ ID NO: 52729 - protein, 468 aa, Saccharomyces cerevisiae
MGQILSNPIIDKEHHSGTDCLTAFGLCAMQGWRMSMEDAHIVEPNLLAESDEEHLAFYGIFDGHGGSSVAEFCGSKMISILKKQESFKSGMLEQCLIDTFLATDVELLKDEKLKDDHSGCTATVILVSQLKKLLICANSGDSRTVLSTGGNSKAMSFDHKPTLLSEKSRIVAADGFVEMDRVNGNLALSRAIGDFEFKSNTKLGPHEQVVTCVPDIICHNLNYDEDEFVILACDGIWDCLTSQECVDLVHYGISQGNMTLSDISSRIVDVCCSPTTEGSGIGCDNMSISIVALLKENESESQWFERMRSKNYNIQTSFVQRRKSIFDFHDFSDDDNEVFAITTKKLQDRLNRSKDNDDMEIDDLDTELDSSATPSKLSGEDRTGPIDLFSLEALLEAGIQIRQRPSSDSDGNTSYFHGASLSDMLASLSNAAAGETEPNDADDNDDNDGEENGKNENAKKGSKIEEIE

SEQ ID NO: 52730 - protein, 140 aa, Bradyrhizobium sp. BTAi1
MAIERTFSIIKPDATERNLTGAINALIEKAGLRIVAQKRIRMTREQAETFYAVHKARPFFGELVDFMISGPVVVQVLEGEGAILKYRDVMGATDPSKAADGTIRKLHAKSIGENSVHGSDAAETAAIEIAQFFSGNEIVG

SEQ ID NO: 52731 - protein, 147 aa, Petroselinum crispum
MASVQNQNQVSSGSDGDLRYATFDEKKRKRMISNRESARRSRMKKQQHVDKLIAEMSQLQSQNKVVTQKINEATDMFFGVVSENNVLRAQLSELTDRLYSLNSVLHIVEEVSGLAMDIPQVPDTLMEPWQLPCPAQPITTSANMFKF

SEQ ID NO: 52732 - protein, 250 aa, Oceanobacillus iheyensis HTE831
MNVNKTREREQLSDEQVKELIRLSQQGDQSARDRLVEKNIRLVWSVVQRFINRGYDPDDLFQIGSIGLIKSIDKFDLSYDVKFSTYAVPMIIGEIQRFIRDDGSIKVSRSLKEIGNKIRRKKDEMTKQYGRSPTVNELAEALELQPEEVVHAQEAAKSPQSIYETVFENDGDPITLLDQIADQDSKWFEKLSLQEAIRSLTERERLIIYLRYYKDKTQTEVAERLGISQVQVSRLEKKILEDMKKNMDTS

SEQ ID NO: 52733 - protein, 750 aa, Cyanidioschyzon merolae
MFTAGFILAVLAVIAFGTLIFTYRLYEYLIGCPEGPQSMRDVARPIQEGASGFFKVQYSTIASIAGIFALVIYFFGTGGAGGTTQASPFFNAAAFLLGGTLSALSGVLTMYLAVRVNVRVAAAASRSYAEAMKVCFRGGLFGGLLILSNCLVGFILLYWFALVTGMAAGDITQVPVLFVGYAFGASFVALFAQLGGGIYTKAADVGADMVGKVDTGIPEDDPRNPATIADLVGDNVGDASGRSCDLFESISAELVGASILGGTLARTANLSGASQAAYVLFPLCVHAVGLVCSALGGVTVRVSSGVARDEERSLLRTDDAFETRLEDPMSIMKRGFRVTMVLAAISIWVLCWLLLRVGNVAPSAWWHYALCGMIGLAVSYLYVLITEYYTDTKFRPVRSIAEASEYGHGTNVIRMLAVGLESSALPAIVVSAAILGAYWLGATSGMPDRNAAGIFGTAVATMGMLSSAGIVLAMDVFGPVADNAGGIAEMSGADPSVRRITDRLDAAGNSTKAFTKGFAVGSAALAGYLLFSSFMEEMSAQLPEKMVFNSVDLAKPEVFVAGLLGAAVVFLFSSLAMTAVGRAAQGVVAEVRRQFRDHPGIMAGTEKPEYERCVALVAASALRQMVLPGLLPVLAPIMIGMLFRFIGNMTGRPLLGLECAAGLLMVATIAGILMALFMNNAGGAADNAKKYIEDGHYGGKGSQAHKASVTGDTVGDPLKDTAGPSLHVLIKMLSTLTMVFGPAFVGSIGA

SEQ ID NO: 52734 - protein, 174 aa, Petroselinum crispum
MASSGGNSSGSTQKLQNSGSEGDLMDQRKRKRMQSNRESARRSRQRKQNHLDELMAQAAQLRKENNQIITTTNLTTQQFVKVEAENSVLRAQMDELTQRLQSLNDILHYINTTTTAAAAATAAATTGIDGVFEMDNLFGLDDHQSSYMNNNNNNNNSWNMMYPNQPIMADMFMY

SEQ ID NO: 52735 - protein, 426 aa, Zea mays
  misc_feature (410)..(410): Xaa can be any naturally occurring amino acid
  unsure (1)..(426): unsure at all Xaa locations
MYESFDFYTVVYELFLDIWVLLVLHRSDLSEGAGAMADQQQPQQQPQEMDVDRTGGLELPPGFRFHPSDFEIVSHYLKNKVHDRDYSCIAIADADLNKTEPWDLPKVAKMGEKEWYFFYQKDRKYPTGLRANRATEAGYWKATGKDKEVYDPLAAEGLLLVGMKKTLVFYKGRAPRGDKTNWVMHEYRLEGSGRLPASPASASGSATNIAAAMMKASASACKDEWVVCRVFNKTTGIKKTAAPAYQVAMAGAEMDQNQNNIPAIPIPMPLQLPLPVPMQMQFPILPDFVMDPVAPYYPNPNAGAGMMPPMAAGIGGAGGLQINGALFGNPMPAPLPMNFYHHQMGMGAAAGQVDMGAAAGQMDMGAAGAGAGGFDVAAPESRPSSMVSQKDEQANAAEISSMMSVTGPGXSATTTIEMDGIWKYKY

SEQ ID NO: 52736 - protein, 300 aa, Mannheimia succiniciproducens MBEL55E
MQWLKYKHRCKYSLGGNKMQTFKLNNGVEIPVLGFGVFQIPPEETEQAVISAIHAGYRHIDTAQAYMNETETGAGIRNSGVVREEIFVTSKVWIENYGYEAAKASLDRTLARLDIGYIDLMLLHQPFNDVYGAWRALEEYLAAGKIRAIGLSNFTADRVLDVGLYNKVMPAVNQIEINPFHQQQAQVEGLLSEGIVPEAWGPFAEGKFGIFENPVLAKIGQKYGKSIAQVVTRWLVQRGVVVLAKSTRPERMAENLNVFDFELDADDFAQIAALDVGKSQIISHTDLAMVRQFKEWVFNV

SEQ ID NO: 52737 - protein, 445 aa, ASPERGILLUS NIDULANS FGSC A4
MSTPSSVSSSSYSAAKSRLASLASHIMGSSSASPVFSTAVVPSAPEDPLFGLAQAYRQDPSDKKVDLVIGAYRDDNAKPWVLPVVKKADELIRNDPNLNHEYLPIKGLAEYTTAAQKLIIGADSPAIAENRVCTFQTISGTGAVHLGALFLARFHPATPKPTLYLSSPTWANHHQIFTNVGFTLANYPYFSPQTKGLDFDGMINALRSAPAGSIILLHACAHNPTGVDLTQEQWKEVAVVMRDRSHFPFFDCAYQGFASGDLARDAWAIRYFVEQGFELCIAQSFAKNFGLYGERTGAFHFVSAPGPEAAQSSAHVASQLAILQRSEISNPPAYGARIASKVLNDPELFAQWEDDLRTMSGRIVEMRKGLRQRLEEKKTPGSWNHITDQIGMFSFTGLSEAQVKVLREKWHVYMTKNGRISMAGLNSHNLDYFAEAVDSVVRETS

SEQ ID NO: 52738 - protein, 598 aa, Schizosaccharomyces pombe
MSVPLRFSTPSSSPSASDNESVHDDGPTTELDTFNTTDVPRRVNTTKARQMRPKNTLKVAFSSPNLKGLDNTADSDSQPWLGGYLAGRLEDISGQSRRNYVDPYYEELNAGRRPNKPVWSLNGPLPHVLGNSVVEKISQKNQEARSRANSRVNSRANSRANSSVSLAGMDGSPNWKRKMKSAVFGSRVKLNDEEAQLPRNKSSVSIAEQAASRPKVSFSLQSSRQPSIAEEQPQTQRKSSAITVEHAENAEPETPRNNVSFSRKPSIAEQDSSQDITMPPNEIIAEESLDSGSDTETLYLNYWCKIRHFFREGFAEFLGTLVLVVFGVGSNLQATVTNGAGGSFESLSFAWGFGCMLGVYIAGGISGGHVNPAVTISLAIFRKFPWYKVPIYIFFQIWGAFFGGALAYGYHWSSITEFEGGKDIRTPATGGCLYTNPKPYVTWRNAFFDEFIGTAVLVGCLFAILDDTNSPPTQGMTAFIVGLLIAAIGMALGYQTSFTLNPARDLGPRMFAWWIGYGPHSFHLYHWWWTWGAWGGTIGGGIAGGLIYDLVIFTGPESPLNYPDNGFIDKKVHQITAKFEKEEEVENLEKTDSPIENN

SEQ ID NO: 52739 - protein, 261 aa, Debaryomyces hansenii CBS767
MSLPGSFDLTPEDAKLLLAANVHLGSKNVQVHNKPYVYKTRPDGVNVINVGKTWEKIVLAARIIAAIPNAADVAVCSTRTFGQRAVLKFAAHTGATPIAGRFTPGNFTNYITRSFKEPRLVVVTDPRTDFQAIKESSYVNIPVIALTDMDSPSEYVDVAIPCNNKGKHSIGLIWWLVAREVLRLRGIIPDRTTEWSVMPDLYFYRDPEEIEQNATEDIKTDDVEEAPAADAETEWTGETEEVDWAESGATPAAEEAAASNW

SEQ ID NO: 52740 - protein, 95 aa, Brassica rapa
GTSRDVDPNANDLQVESLARFAVDEHNKKENVSLEYRRLIGAKTQVVAGTMHHLTVEVADGETKKVYEAKVLEKAWENLKKLEDFTHLRMFSFIT

SEQ ID NO: 52741 - protein, 536 aa, Arabidopsis thaliana
  misc_feature (127)..(127): Xaa can be any naturally occurring amino acid
  unsure (1)..(536): unsure at all Xaa locations
MASTFTATSSIGSMVAPNGHKSDKKLISKLSSSSFGRRQSVCPRPRRSSSAIVCAAKELHFNKDGTTIRRLQAGVNKLADLVGVTLGPKGRNVVLESKYGSPRIVNDGVTVAREVELEDPVENIGVXEVEDSELADVAAVSAGNNDEIGNMIAEAMSKVGRKGVVTLEEGKSAENNLYVVEGMQFDRGYISPYFVTDSEKMSVEFDNCKLLLVDKKITNARDLVGVLEDAIRGGYPILIIAEDIEQEALATLVVNKLRGTLKIAALRAPGFGERKSQYLDDIAILTGATVIREEVGLSLDKAGKEVLGNASKVVLTKETSTIVGDGSTQDAVKKRVTQIKNLIEQAEQDYEKEKLNERIAKLSGGVAVIQVGAQTETELKEKKLRVEDALNATKAAVEEGIVVGGGCTLLRLASKVDAIKATLDNDEEKVGADIVKRALSYPLKLIAKNAGVNGSVVSEKVLSNDNVKFGYNAATGKYEDLMAAGIIDPTKVVRCCLEHAASVAKTFLMSDCVVVEIKEPEPVPVGNPMDNSGYGY

SEQ ID NO: 52742 - protein, 721 aa, Ustilago maydis 521
MSSSPQHRGAAVASTSPFAIQEEGGHSSWAEQPSSSPSGHALNADGHNPPPFTSRTSSANSHAKVRPASLPQHLSTQSLGRSARLSPRNSIDSVSRRPPLVDRVTSSRSLFLPSINYSLSHQTDETDDWRATAIGVTPLDRTMDRIGMGRYQWSVLILSGFGWAADNMWIQAIAIILPHIQRYFTLSDGIVGLASSSIFVGMFVGSIAWGTISDSYGRRAAFNITLAVTAIFGSLSAMASSFPLLCLLLFAVGTGVGGSMPTDSSNLVENLPVRKHSYVTALSVFFSAGSVAASLIGLSVLSASNPDGWRWLLGALAFVTVLFVSARVVFFRLLESPKYLVHSGRPQEARDILQRIQRFNGGAIISLRIQDVEDHSGSSVRHGGEDLESSQHSLQQRPSQNNASQRHGEDDAGRTPSDGSRNSYTVDEDDVQTASGQDASSLPLLGGQADAANAHESRKSDSQDSSMRIQNGSAPSHPHTDTADLPAWLSWLPRSWHPSAADLASRYSEMFSPEWKRTTLLIWIIWGGMSYGFTTFNVLLPKLLEQRHDLRSAQSGAEPDDASIRHALVDILVYSLSSLPGSLISAYMVETRLGRIGTMVSSTAVMSASILIFSLTYWRSSLTVVSISSSISYAAIYGYTPEVMAPTIRATACGTASAISRVTGIIAPILAGWAFSLSPPAPLFLATTVLLCVTLAMAMLPIETRSRAADTSQAENGASAH

SEQ ID NO: 52743 - protein, 413 aa, Arabidopsis thaliana
MGSGRYLDDPLTFTRNPPSSSSPITESSFLAESISRSGSFESGSLRGGDGDCFSDVDFALDKLAGTVQFYERHVFLCYKKPSVWPARIEASEFDRLPRLLSSVISARKSSMKKETLLTICEGHDGSETSNGDVLIFPDMIRYRRLTHFDVDTFVEEVLVKGVEWLPGNPESLSSSYVFVCCHGSRDRRCGVCGPSLVSRFREEIDSCGLRGEVSVSPCSHIGGHKYTGDVIIYGLNINQRVTGHWYGCVTLEDVPLLLEQHINKGEIVDRLWRGEMGLPEEDQKKTQEQRLQLNSEKISNREVTQESVNNSICCQSRAVPELNGSGCQQNGNSSYCLEEIHTEKNTSERVTSVKNASLRIGSSENGSSGGFKVCAVMSMWLETWEREDTYAALAVACAAASVAIAYNCYKQLK

SEQ ID NO: 52744 - protein, 239 aa, Desulfotalea psychrophila LSv54
MMKQIEGVTFDFYETLIHCRNDISRGKAYMHYLMGQGLQAAPWQHDVIYDIFEYYADAYAPNLSEYDKVLFWQEFTRRLFTRTDVSTDGFNQLSRHTEAIRDIFSPGYFQLYPEVIEVLDRLSSRDLLLGVISNWPRGLACFCQELGIFHQLGAIVSSAEIGIEKPDPEIFREASRQLHLSPEAILHIGDQLWDDVNGAKSAGCHAVWLNRGGGGEAGQVISNLSEIEGLIEEINRSIA

SEQ ID NO: 52745 - protein, 168 aa, Avena sterilis subsp. ludoviciana
VMASSATSVAPFQGLKSTAGLPVSRRSNAGLGSVSNGGRIRCMQVWPIEGIKKFETLSYLPPLTEEALLKQIDFLIRSKWVPCLEFSQGGFIFREHGSTPGYYDGRYWTMWKLPMFGCTDASQVIKEVEEVKKEYPDAYVRIIGFDNIRQVQCVSFIAFKPPGCEESG

SEQ ID NO: 52746 - protein, 342 aa, Shigella flexneri 2a str. 301
MFRQGITGRSHLMSQNTLKVHDLNEDAEFDENGVEVFDEKALVEEEPSDNDLAEEELLSQGATQRVLDATQLYLGEIGYSPLLTAEEEVYFARRALRGDVASRRRMIESNLRLVVKIARRYGNRGLALLDLIEEGNLGLIRAVEKFDPERGFRFSTYATWWIRQTIERAIMNQTRTIRLPIHIVKELNVYLRTARELSHKLDHEPSAEEIAEQLDKPVDDVSRMLRLNERITSVDTPLGGDSEKALLDILADEKENGPEDTTQDDDMKQSIVKWLFELNAKQREVLARRFGLLGYEAATLEDVGREIGLTRERVRQIQVEGLRRLREILQTQGLNIEALFRK

SEQ ID NO: 52747 - protein, 458 aa, Caulobacter crescentus CB15
MDADVRSAPLIPPAPKVHPRQLGGSFVGELRIALEMSRNLMGAWCEEDFDNLFTPYVFMGQPGMVVSDPAAARRILSSPNYVRPVKAARSVRPIAGDGLLLSEGETWRRQRKSLAPVFTPMAVEGLLPHFVAAGASLAEALSGHARADLSEAFHHATLDAVLSALFSRRADAQGDQLAYMVRRYMEGPAHFNLMDFVSRGADDLTFLDVERRRQGAAWFQAVEHLIAQRQAHPHAEARDLLDRLLAARDEDGAPLSNQEIRDQCGTMLVAGFETTSRLLFWATYLLALDPATQDRLRAEVLAAPAAAVRTLDDLQAWPLMRSVLFETLRLYPTAPLLAREAIGPDTVMGHAVVPGQIITISPWLIHRHRKLWDAPTAFVPDRFIDQPHPWGIEAFLPFGAGPRVCIGASFALAEAQIVLASLLERFEIGLVSDRPVIPIASITLGPDHAPAFTLTPVS

SEQ ID NO: 52748 - protein, 325 aa, Xanthomonas oryzae pv. oryzae KACC10331
MSDTTMTAIAIRDGKGDADALYATEQPRPRPAAGQVLMRVNAAGINRPDLLQRAGHYPPPPGAPETLGLEIAGEIVEPAGRWKVGERVCALLGGGGYAQYAAVDARHVLPIPAGMDLVHAAALPETIFTAYANLFEHGRLAAGEWLLLHGATSGIGVTAIQMAKAAGAHVLATARSASKAAQARALGADVAIDSTSESFVEVAKAHGGIDVALDMVGAAVFADTLEALNQRGRIVYIASQAGATIELPIPVLMRKQAVITGSTLRPRTADEKARLAAEVERVVWPWIAEGKLRVLVDKRFPLAEAAAAHRYLEQGSHLGKIVLEI

SEQ ID NO: 52749 - protein, 379 aa, Desulfotalea psychrophila LSv54
MRMKDIFEFADELGPLKVIHVYEPSVNLRAVLVVDNIARGPSLGGVRMATDVSVEECVRLARAMTYKNSAAGLPHGGGKAVLYGDPKMAKVEKEKMIRALAKVLRNEDSYIFAPDMGTDEECMAWVQDEIGRVVGLPREIGGIPLDEIGATGFGLSHAVDVALNYCDFQLEGARVVVQGFGAVGKHAARYLSQRGAVLVAVADSRGAIYNPDGLDVQQLIALKAAGGFVGDYPEARKMTGDDLLDVACDIWIPAARPDVIHEANVHRLNTRLVVEGANIPLTHGAERILHERGILCLPDFIANAGGVICAAMEYQGASQVAALAMIEEKLRANTEQVLAMVKDRDMLPREAAMEMALGRLKKAMSYRRFSLFSSGPKFI

SEQ ID NO: 52750 - protein, 509 aa, Triticum aestivum
LERHENALLKQENEKLRTENLTMTEAMRTPMCGGCGSPAMLGEVSLEEQHPRGQNARLKDELNRVCTLATKFLGKPVSLLSPLQLQPHLSMPLPNSSLELAVGGIGGIGSMQPSMHGMMSEYAGGASSSMGTVITPARATGPALASMVDIDRSVFLELAISAMDELVKMAQTDDPLWVTGSPGFPDKESLNFEEYLHSSQHCIGMKPVGFVSEASRESGLVIIDNSVALVETLMDERRWSDMFSCMIAKATILEEVSNGIGGSRNGALLLMKAELQVLSPLVPIREVIFLRFCKQLAEGAWAVVDVSIDGLLSNQNSATTSAGANLKCRRLPSGCVMQDTPNGYCKVTWVEHTEYDEASVHQFYRPLLRSGLAFGASRWLATLQRQCECLAILMSSATVSPNEPTAISQEGKRSMLKLARRMTENFCAGVSASSAREWSKLDGATGSIGEDVRVMARKSVSEPGEPPRVVLSAATSVWVPIAPGIVHFCVMACWDTSWRPSECERDMES

SEQ ID NO: 52751 - protein, 382 aa, Brassica juncea
MASSSPQHCHIIEVNRGKSVEESTTILASKACGEAPCGFSDLNNASGDAQERNASMRKLCIAVVLCLLFMTVEVFGGIKANSLAILTDAAHLLSDVAAFAISLFSLWAAGWEATPRQTYGFFRIEILGALVSIQLIWLLTGILVYEAIIRLLSETSEVNGFLMFLVAAFGLLVNIIMAVLLGHDHGHGHGHGHDHHSHGVTVTTHHHHHGHGEDKHHHHAHGDEDVTEQLLEKSEKRKRNINVQGAYLHVLGDSIQSVGVMIGGGIIWYNPEWKIVDLICTLVFSVIVLGTTINMIRSILEVLMESTPREIDATKLEKGLLEMEEVVAVHELHIWAITVGKVLLACHVNITPEADADMVLNKVIDYIRREYNISHVTIQIER

SEQ ID NO: 52752 - protein, 421 aa, Thermococcus kodakarensis KOD1
MVEIDPFEMAVQQLERAAQFMDISEEALEWLKRPMRIVEVSVPVEMDDGSVKVFTGFRVQHNWARGPTKGGIRWHPAETLSTVKALATWMTWKVAVVDLPYGGGKGGIIVDPKKLSEREQERLARSYIRAVYDVIGPWTDIPAPDVYTNPKIMAWMMDEYETIMRRKGPAFGVITGKPPGVGGIVARMDATARGAAFTIREAAKALGWDDLKGKTIAIQGYGNAGYYLHKIMSEEFGMKVVAVSDSKGGIYNPDGLPPADEVLKWKKEHGSVKDMPGTQNITNEELLELEVDILAPSAIEGVITKENADNVKAKIVAEVANGPVTPEADEILHEKGILQIPDFLCNAGGVTVSYFEWVQNINGFYWTVEETRKRLDDKMTKAFWDVFNTHKEKNIHMRDAAYVVAVSRVYEAMKHRGWVKK

SEQ ID NO: 52753 - protein, 117 aa, Oryza sativa
MTRIGALRTEFWMHISFPNSNKHTAIEKIDEAVWSPSLEDLVDDVVTNDELLGDGVDGVDDAGDVAEEGEQQADPELMPASELEEDAEGREDDGAAMRMSMQFAVPAISPRSKIDSR

SEQ ID NO: 52754 - protein, 483 aa, Oryza sativa (japonica cultivar-group); identical to SEQ ID NO: 863

SEQ ID NO: 52755 - protein, 258 aa, Arabidopsis thaliana
MGKRATTSVRREELNRGAWTDHEDKILRDYITTHGEGKWSTLPNQAGLKRCGKSCRLRWKNYLRPGIKRGNISSDEEELIIRLHNLLGNRWSLIAGRLPGRTDNEIKNHWNSNLRKRLPKTQTKQPKRIKHSTNNENNVCVIRTKAIRCSKTLLFSDLSLQKKSSTSPLPLKEQEMDQGGSSLMGDLEFDFDRIHSEFHFPDLMDFDGLDCGNVTSLVSSNEILGELVPAQGNLDLNRPFTSCHHRGDDEDWLRDFTC

SEQ ID NO: 52756 - protein, 376 aa, Glycine max
MSFSRLLRVQNPGLCLLFNYSQPLTSSSSSSLPLTRDRAALTFTTKVSYSSDMVKAIRVHELGGPQVLKWEDVEIGDPKEGEVRVRNKAIGVNFIDVYFRKGVYKAPSFPFTPGMEAVGVVTAVGAGLTGRQVGDLVAYAGQPMGSYAEEQILPANKVVPVPSSIDPAVAASIILKGMTTQFLLRRCFQVEPGHTILVHAAAGGVGSLLCQWANALGATVIGTVSNKEKAAQAKEDGCHHVIIYKEEDFVARVNEITSGNGVEVVYDSVGKDTFEGSLACLKLRGYMVSFGQSSGSPDPVPLSSLAAKSLFLTRPSLMQYVVTRDELLEAAGEVFANVASGVLKVRVNHTYPLSEAAKAHEDLENRKTSGSVVLIP

SEQ ID NO: 52757 - protein, 585 aa, Thermoactinomyces vulgaris
MLLEAIFHEAKGSYAYPISETQLRVRLRAKKGDVVRCEVLYADRYASPEEELAHALAGKAGSDERFDYFEALLECSTKRVKYVFLLTGPQGEAVYFGETGFSAERSKAGVFQYAYIHRSEVFTTPEWAKEAVIYQIFPERFANGDPSNDPPGTEQWAKDARPRHDSFYGGDLKGVIDRLPYLEELGVTALYFTPIFASPSHHKYDTADYLAIDPQFGDLPTFRRLVDEAHRRGIKIILDAVFNHAGDQFFAFRDVLQKGEQSRYKDWFFIEDFPVSKTSRTNYETAAVQVPAMPKLRTENPEVKEYLFDVARFWMEQGIDGWRLDVANEVDHAFWREFRRLVKSLNPDALIVGEIWHDASGWLMGDQFDSVMNYLFRESVIRFFATGEIHAERFDAELTRARMLYPEQAAQGLWNLLDSHDTERFLTSCGGNEAKFRLAVLFQMTYLGTPLIYYGDEIGMAGATDPDCRRPMIWEEKEQNRGLFEFYKELIRLRHRLASLTRGNVRSWHADKQANLYAFVRTVQDQHVGVVLNNRGEKQTVLLQVPESGGKTWLDCLTGEEVHGKQGQLKLTLRPYQGMILWNGR

SEQ ID NO: 52758 - protein, 91 aa, Arachis hypogaea
MASKQQNRQELDERAKQGETVVPGGTGGKSLEAQEHLAEGKSKGGQTRREQLGTEGYQEMGRKGGFSTMEKSGEERAEEEGVKIDESKFAT

SEQ ID NO: 52759 - protein, 585 aa, Thermoactinomyces vulgaris
MLLEAIFHEAKGSYAYPISETQLRVRLRAKKGDVVRCEVLYADRYASPEEELAHALAGKAGSDERFDYFEALLECSTKRVKYVFLLTGPQGEAVYFGETGFSAERSKAGVFQYAYIHRSEVFTTPEWAKEAVIYQIFPERFANGDPSNDPPGTEQWAKDARPRHDSFYGGDLKGVIDRLPYLEELGVTALYFTPIFASPSHHKYDTADYLAIDPQFGDLPTFRRLVDEAHRRGIKIILDAVFNHAGDQFFAFRDVLQKGEQSRYKDWFFIEDFPVSKTSRTNYETYAVQVPAMPKLRTENPEVKEYLFDVARFWMEQGIDGWRLDVANEVDHAFWREFRRLVKSLNPDALIVGEIWHDASGWLMGDQFDSVMNYLFRESVIRFFATGEIHAERFDAELTRARMLYPEQAAQGLWNLLDSHDTERFLTSCGGNEAKFRLAVLFQMTYLGTPLIYYGDEIGMAGATDPDCRRPMIWEEKEQNRGLFEFYKELIRLRHRLASLTRGNVRSWHADKQANLYAFVRTVQDQHVGVVLNNRGEKQTVLLQVPESGGKTWLDCLTGEEVHGKQGQLKLTLRPYQGMILWNGR

SEQ ID NO: 52760 - protein, 554 aa, Moorella thermoacetica ATCC 39073
MSLRRRYIHLNRYRQVVNVLARYGFGYLLDQVGLGELILRRSREEAPLSLGQRLRLALEELGPTFIKLGQLLSTRPDLLPADIISELTRLQDRVPPFPFADVRKAVEEELGQPLEELFASFDPEPLAVASIGQVHLATLPDGSQVIVKVQRPGIARQVRVDLEILFDLARLAQRHTPYGKIYDFNQMAAEFARALTEELDYTREGRNADRFRENFAGDASVYFPAVYWDYTTRGVLTQEYVEAVKLNNLEEIDRRGYSRRRIAVNLARAVYQQVLVDGFFHGDPHPGNLAVLPGEVIVFMDFGLTGTLTEELKEQFVNLVLGIIRRRSQDVLRTIIAMGMVPAEVDRGALRREIEALRDKYYHLSFRQISLGQAIEELLQLAFRYHLRMPPELTLLGKTLLTLEGLVRKLDPELELAELAEPYGRELLRRRFSVRFLWRALTENLASGWEVMQSLPRQFQHLLDLAERGELTLRVEPLHLRGLVRQIDRIINKLTMSVVLLAFSIIMASLIISTALGAPTNSLFFRLPTLEVGFGAAGMMLLWLLVTIWRGGRD

SEQ ID NO: 52761 - protein, 528 aa, Arabidopsis thaliana
MGNCCSHGRDSADNGDALENGASASNAANSTGPTAEASVPQSKHAPPSPPPATKQGPIGPVLGRPMEDVKASYSLGKELGRGQFGVTHLCTQKATGHQFACKTIAKRKLVNKEDIEDVRREVQIMHHLTGQPNIVELKGAYEDKHSVHLVMELCAGGELFDRIIAKGHYSERAAASLLRTIVQIVHTCHSMGVIHRDLKPENFLLLNKDENSPLKATDFGLSVFYKPGEVFKDIVGSAYYIAPEVLKRKYGPEADIWSIGVMLYILLCGVPPFWAESENGIFNAILRGHVDFSSDPWPSISPQAKDLVKKMLNSDPKQRLTAAQVLNHPWIKEDGEAPDVPLDNAVMSRLKQFKAMNNFKKVALRVIAGCLSEEEIMGLKEMFKGMDTDSSGTITLEELRQGLAKQGTRLSEYEVQQLMEAADADGNGTIDYGEFIAATMHINRLDREEHLYSAFQHFDKDNSGYITMEELEQALREFGMNDGRDIKEIISEVDGDNDGRINYDEFVAMMRKGNPDPIPKKRRELSFK

SEQ ID NO: 52762 - protein, 355 aa, Arabidopsis thaliana
MVNPSSPGIAILGAGIFVKTQYIPRLAEISDLVDLKAIWSRTEESAKGAVEIARKHFPEVKCKWGDEGLNEIIQDSSIVGVAVVVAAETMVELSLKMLKAGKHVLQEKPAAASISEIETAMSSYRNISADSPCRPIWAVAENYRFEPAFVELKKLIAEIGDMMNVQLIIEGSMNSSNPYFSSSWRRNLSGGFILDMGVHYIAGLRMLVGCEVTSVSATTTHVDKTLPGPDNITSNFQLENGCSGVFVMVVSSRSPKILWRIVGLKGTVQLERGVEGGRHGYMATIYGEGGTSRTIFYPFSGVTEELKAFFNDISETSKEQEPRLSYVEGARDVAVLEAMLESGAKNGAVVPVNKF

SEQ ID NO: 52763 - protein, 271 aa, Moorella thermoacetica ATCC 39073
MEKDLQSLMATARRIRRDIVRMVGAAGSGHPGGSLSAVEIMTALYFKVMRLDPERPDWPERDRFVLSKGHAAPVLYAALAERGFFAVDKLDTLRRLGSPLQGHPDRKSLPGVEVSTGSLGHGLAVANGMALAGRLDGRDYHVYVLLGDGELEEGMVWEGAMAAAHYHLDNLTAIVDHNHLQIDGRVEEVMSPEPVADKFRAFGWEVMTIDGHDFGQILDALERAREVKGKPTVIIAETIKGKGVSFMENQAGWHGKAPKPEEVEKALAELA

SEQ ID NO: 52764 - protein, 549 aa, Shewanella oneidensis MR-1
MTLASIRRGYHVIKTLLQYGLDDVLPPKMTPWYFTLARNSLFWIRNKHKDKSGGERLKLAMQELGPVYIKLGQMLSTRRDLLSDEWATELAMLQDKVPPFDGALARLAIEAELKAPIETFFDDFNETPLASASISQVHTATLKSNGKAVVLKVLRPNVETKIQADLLLMSQTAKVIDYLLGEGNRLRPAEVIEDYRVTILGELNLKLEALNAIKLRNNFIDSDALYIPYVYEEFCYPRLMVMERIYGIPVSDIVALKAQGTNFKLLAERGVELFFTQVFRDNFFHADMHPGNIFISRENPENPYYIGLDCGIMGTLSEVDKRYLAENFLAFFNRDYHRIAQLYIESGWVSEKTDLQAFEQAIKVVCEPMFNKPLDEISFGHVLLELFRTARHFDIVVQPQLVLLEKTLLYIEGLGRQLYPQLDLWQTAKPFLEQWMAEQVGPKAMFKKVSTKLPYWSDKLPEFPELIYDNLKLGRKLLSSQQQMLDKYLKYQQQAHKSNYLLITSAILLICGTLLFNQDATLLSPYVCLISGAVLWIIGWRSRPKNRKF

SEQ ID NO: 52765 - protein, 311 aa, Moorella thermoacetica ATCC 39073
MTKIATREAYGKALVELGRQNSQVVVLDADLSKSTMTRYFAQEFPERFFNMGIAEQSLMATAAGLGLSGKIPFASTFAVFATGRAYDQVRNGIAYPKVNVKIAATHAGLTVGEDGASHQAVEDVTLMRAIPNMTVIVPADGEETRQAVFAAAAYQGPVYIRLGRPAVPVIYNEDYRFQIGRAHTLRRGKDAAIIACGVMVHEALRAAEELAAAGLEVMVVNMSTIKPLDREAVLAAAATGAVVTAEEHTVIGGLGSAVAEVLATERPVPLAMVGIRDTFGESGKPDELMAKYGLTARDIVAAVKRLKGKKD

SEQ ID NO: 52766 - protein, 513 aa, Oryza sativa (japonica cultivar-group)
MQPDPSGSGGDGNANAKAKLAPPPVTAAGGRPVSVLPHKTANVRDHYRIGKKLGQGQFGTTYLCVDKASGGEFACKSIPKRKLLCREDYEDVWREIQIMHHLSEHPNVVRIRGAYEDALFVHIVMELCAGGELFDRIVAKGHYTERAAAQLIRTIVAVVEGCHSLGVMHRDLKPENFLFASAAEDAPLKATDFGLSMFYKPGDKFSDVVGSPYYVAPEVLQKCYGPESDVWSAGVILYILLCGVPPFWAETEAGIFRQILRGKLDFESEPWPSISDSAKDLVRNMLCRDPTKRLTAHEVLCHPWIVDDAVAPDKPIDSAVLSRLKHFSAMNKLKKMALRVIAESLSEEEIGGLKELFKMIDTDDSGTITFDELKEGLKRVGSELTEHEIQALMEAADIDNSGTIDYGEFIAATLHMNKLEREENLVSAFSFFDKDGSGFITIDELSQACREFGLDDLHLEDMIKDVDQNNDGQIDYSEFTAMMRKGNAGGAGRRTMRNSLQLNLGEILNPSNS

SEQ ID NO: 52767 - protein, 378 aa, Bordetella bronchiseptica RB50
MTAQTSAVSVISAANRLVAKVGSSLVTNEGRGLDRAAVGHWAAQIAALHQQGKQVVLVSSGAIAEGMARLGWRKRPSAMHELQAAAAVGQMGLCQAYEAAFAEFGLRTAQILLTHEDLADRHRYLNARSTLFALLRLGVVPIVNENDTVVTDEIRFGDNDTLGALVTNLIEADALIILTDQRGLYEADPRRDPAARFVAHAQAGDAALEAMAGGAGSGVGTGGMLTKILAAKRAAHSGAHTVIASGRERNVLTRLAQGECIGTELRAVLPVWSARKQWLADHLRLRGRVVLDDGAVHALLHEGKSLLPIGVAEVQGEFERGDVVACVDMHGRECARGLINYSSADTRRILRQPSSQIARILGSMTDPELMHRDNLVVT

SEQ ID NO: 52768 - DNA, 9215 bp, Artificial sequence
  pMON65154
actcaccagtcacagaaaagcatcttacggatggcatgacagtaagagaattatgcagtgctgccataaccatgagtgataacactgcggccaacttacttctgacaacgatcggaggaccgaaggagctaaccgcttttttgcacaacatgggggatcatgtaactcgccttgatcgttgggaaccggagctgaatgaagccataccaaacgacgagcgtgacaccacgatgcctgtagcaatggcaacaacgttgcgcaaactattaactggcgaactacttactctagcttcccggcaacaattaatagactggatggaggcggataaagttgcaggaccacttctgcgctcggcccttccggctggctggtttattgctgataaatctggagccggtgagcgtgggtctcgcggtatcattgcagcactggggccagatggtaagccctcccgtatcgtagttatctacacgacggggagtcaggcaactatggatgaacgaaatagacagatcgctgagataggtgcctcactgattaagcattggtaactgtcagaccaagtttactcatatatactttagattgatttaaaacttcatttttaatttaaaaggatctaggtgaagatcctttttgataatctcatgaccaaaatcccttaacgtgagttttcgttccactgagcgtcagaccccgtagaaaagatcaaaggatcttcttgagatcctttttttctgcgcgtaatctgctgcttgcaaacaaaaaaaccaccgctaccagcggtggtttgtttgccggatcaagagctaccaactctttttccgaaggtaactggcttcagcagagcgcagataccaaatactgtccttctagtgtagccgtagttaggccaccacttcaagaactctgtagcaccgcctacatacctcgctctgctaatcctgttaccagtggctgctgccagtggcgataagtcgtgtcttaccgggttggactcaagacgatagttaccggataaggcgcagcggtcgggctgaacggggggttcgtgcacacagcccagcttggagcgaacgacctacaccgaactgagatacctacagcgtgagctatgagaaagcgccacgcttcccgaagggagaaaggcggacaggtatccggtaagcggcagggtcggaacaggagagcgcacgagggagcttccagggggaaacgcctggtatctttatagtcctgtcgggtttcgccacctctgacttgagcgtcgatttttgtgatgctcgtcaggggggcggagcctatggaaaaacgccagcaacgcggcctttttacggttcctggccttttgctggccttttgctcacatgttctttcctgcgttatcccctgattctgtggataaccgtattaccgcctttgagtgagctgataccgctcgccgcagccgaacgaccgagcgcagcgagtcagtgagcgaggaagcggaagagcgcccaatacgcaaaccgcctctccccgcgcgttggccgattcattaatgcagctggcacgacaggtttcccgactggaaagcgggcagtgagcgcaacgcaattaatgtgagttagctcactcattaggcaccccaggctttacactttatgcttccggctcgtatgttgtgtggaattgtgagcggataacaatttcacacaggaaacagctatgaccatgattacgccaagctcgaaattaaccctcactaaagggaacaaaagctggagctgagtactggcgcgcctgcggccgcctcgaggtcattcatatgcttgagaagagagtcgggatagtccaaaataaaacaaaggtaagattacctggtcaaaagtgaaaacatcagttaaaaggtggtataaagtaaaatatcggtaataaaaggtggcccaaagtgaaatttactcttttctactattataaaaattgaggatgtttttgtcggtactttgatacgtcatttttgtatgaattggtttttaagtttattcgcttttggaaatgcatatctgtatttgagtcgggttttaagttcgtttgcttttgtaaatacagagggatttgtataagaaatatctttaaaaaaacccatatgctaatttgacataatttttgagaaaaatatatattcaggcgaattctcacaatgaacaataataagattaaaatagctttcccccgttgcagcgcatgggtattttttctagtaaaaataaaagataaacttagactcaaaacatttacaaaaacaacccctaaagttcctaaagcccaaagtgctatccacgatccattagcaaggcccagcccaacccaacccaacccaacccaccccagtccagccaactggacaatagtctccacccccggcactatcaccgtgagttgtccgcaccaccgcacgtctcgcagccaaaaaaaaaaaaagaaagaaaaaaaagaaaaagaaaaacagcaggtgggtccgggtcgtgggggccggaaaagcgaggaggatcgcgagcagcgacgaggcccggccctccctccgcttccaaagaaacgccccccatcgccactatatacatacccccccctctcctcccatccccccaaccctaccaccaccaccaccaccacctcctcccccctcgctgccggacgacgagctcctcccccctccccctccgccgccgccggtaaccaccccgcccctctcctctttctttctccgttttttttttcgtctcggtctcgatctttggccttggtagtttgggtgggcgagagcggcttcgtcgcccagatcggtgcgcgggaggggcgggatctcgcggctggcgtctccgggcgtgagtcggcccggatcctcgcggggaatggggctctcggatgtagatctgatccgccgttgttgggggagatgatggggggtttaaaatttccgccatgctaaacaagatcaggaagaggggaaaagggcactatggtttatatttttatatatttctgctgcttcgtcaggcttagatgtgctagatctttctttcttctttttgtgggtagaatttgaatccctcagcattgttcatcggtagtttttcttttcatgatttgtgacaaatgcagcctcgtgcggagcttttttgtaggtagaccgcgggatatcacaagtttgtacaaaaaagctgaacgagaaacgtaaaatgatataaatatcaatatattaaattagattttgcataaaaaacagactacataatactgtaaaacacaacatatccagtcactatggcggccgcattaggcaccccaggctttacactttatgcttccggctcgtataatgtgtggattttgagttaggatccgtcgagattttcaggagctaaggaagctaaaatggagaaaaaaatcactggatataccaccgttgatatatcccaatggcatcgtaaagaacattttgaggcatttcagtcagttgctcaatgtacctataaccagaccgttcagctggatattacggcctttttaaagaccgtaaagaaaaataagcacaagttttatccggcctttattcacattcttgcccgcctgatgaatgctcatccggaattccgtatggcaatgaaagacggtgagctggtgatatgggatagtgttcacccttgttacaccgttttccatgagcaaactgaaacgttttcatcgctctggagtgaataccacgacgatttccggcagtttctacacatatattcgcaagatgtggcgtgttacggtgaaaacctggcctatttccctaaagggtttattgagaatatgtttttcgtctcagccaatccctgggtgagtttcaccagttttgatttaaacgtggccaatatggacaacttcttcgcccccgttttcaccatgggcaaatattatacccaaggcgacaaggtgctgatgccgctggcgattcaggttcatcatgccgtctgtgatggcttccatgtcggcagaatgcttaatgaattacaacagtactgcgatgagtggcagggcggggcgtaaacgcgtggatccggcttactaaaagccagataacagtatgcgtatttgcgcgctgatttttgcggtataagaatatatactgatatgtatacccgaagtatgtcaaaaagaggtgtgctatgaagcagcgtattacagtgacagttgacagcgacagctatcagttgctcaaggcatatatgatgtcaatatctccggtctggtaagcacaaccatgcagaatgaagcccgtcgtctgcgtgccgaacgctggaaagcggaaaatcaggaagggatggctgaggtcgcccggtttattgaaatgaacggctcttttgctgacgagaacaggggctggtgaaatgcagtttaaggtttacacctataaaagagagagccgttatcgtctgtttgtggatgtacagagtgatattattgacacgcccgggcgacggatggtgatccccctggccagtgcacgtctgctgtcagataaagtctcccgtgaactttacccggtggtgcatatcggggatgaaagctggcgcatgatgaccaccgatatggccagtgtgccggtctccgttatcggggaagaagtggctgatctcagccaccgcgaaaatgacatcaaaaacgccattaacctgatgttctggggaatataaatgtcaggctcccttatacacagccagtctgcaggtcgaccatagtgactggatatgttgtgttttacagtattatgtagtctgttttttatgcaaaatctaatttaatatattgatatttatatcattttacgtttctcgttcagctttcttgtacaaagtggtgatggggatcccccaccctgcaatgtgaccctagacttgtccatcttcggatggccaacttaattaatgtataaataaaaggatgcacacatagtgacatgctaatcactataatgtgggcatcaaagttgtgtgttatgtgtaattactaattatctgaataagagaaagagatcatccatatttcttatcctaaatgaatgtcacgtgtctttataattctttgatgaaccagatgcattttattaaccaattccatatacatataaatattaatcatatataattaatatcaattgggttagcaaaacaaatctagtctaggtgtgttttgctaattattgggggatagtgcaaaaagaaatctacgttctcaataattcagatagaaaacttaataaagtgagataatttacatagattgcttttatcctttgatatatgtgaaaccatgcatgatataaggaaaatagatagagaaataattttttacatcgttgaatatgtaaacaatttaattcaagaagctaggaatataaatattgaggagtttatgattattattattattttgatgttcaatgaagttttttttaatttcatatgaagtatacaaaaattcttcatagatttttgtttctatgccgtagttatctttaatatatttgtggttgaagaaatttattgctagaaacgaatggattgtcaatttttttttaaagcaaatatatatgaaattatactgtatattattttagtcatgattaaaatgtggccttaattgaatcatctttctcattcattttttcaaaagcatatcaggatgattgatatttatctattttaaaaattaatttaagggttcaaattaaatttaacttaaaagtgtcctaaccgtagttaaaggtttactttaaaaaaatactatgaaaaatctaatcttctatgaatcgacctgcaggatttaaatccatcgttctggggcctaacgggccaagctttccgatcctacctgtcacttcatcaaaaggacagtagaaaaggaaggtggcacctacaaatgccatcattgcgataaaggaaaggctatcattcaagatgcctctgccgacagtggtcccaaagatggacccccacccacgaggagcatcgtggaaaaagaagacgttccaaccacgtcttcaaagcaagtggattgatgtgatacttccactgacgtaagggatgacgcacaatcccactatccttcgcaagacccttcctctatataaggaagttcatttcatttggagaggacacgctgaaatcaccagtctctctctacaagatcggggatctctagctagacgatcgtttcgcatgattgaacaagatggattgcacgcaggttctccggccgcttgggtggagaggctattcggctatgactgggcacaacagacaatcggctgctctgatgccgccgtgttccggctgtcagcgcaggggcgcccggttctttttgtcaagaccgacctgtccggtgccctgaatgaactgcaggacgaggcagcgcggctatcgtggctggccacgacgggcgttccttgcgcagctgtgctcgacgttgtcactgaagcgggaagggactggctgctattgggcgaagtgccggggcaggatctcctgtcatctcaccttgctcctgccgagaaagtatccatcatggctgatgcaatgcggcggctgcatacgcttgatccggctacctgcccattcgaccaccaagcgaaacatcgcatcgagcgagcacgtactcggatggaagccggtcttgtcgatcaggatgatctggacgaagagcatcaggggctcgcgccagccgaactgttcgccaggctcaaggcgcgcatgcccgacggcgaggatctcgtcgtgacccatggcgatgcctgcttgccgaatatcatggtggaaaatggccgcttttctggattcatcgactgtggccggctgggtgtggcggaccgctatcaggacatagcgttggctacccgtgatattgctgaagagcttggcggcgaatgggctgaccgcttcctcgtgctttacggtatcgccgctcccgattcgcagcgcatcgccttctatcgccttcttgacgagttcttctgagcgggactctggggttcgaagaattcccgatcgttcaaacatttggcaataaagtttcttaagattgaatcctgttgccggtcttgcgatgattatcatataatttctgttgaattacgttaagcatgtaataattaacatgtaatgcatgacgttatttatgagatgggtttttatgattagagtcccgcaattatacatttaatacgcgatagaaaacaaaatatagcgcgcaaactaggataaattatcgcgcgcggtgtcatctatgttactagatcggggatatcgcgtgtctttataattctttgatgaaccagatgcattttattaaccaattccatatacatataaatattaatcatatataattaatatcaattgggttagcaaaacaaatctagtctaggtgtgttttgctaattattgggggatagtgcaaaaagaaatctacgttctcaataattcagatagaaaacttaataaagtgagataatttacatagattgcttttatcctttgatatatgtgaaaccatgcatgatataaggaaaatagatagagaaataattttttacatcgttgaatatgtaaacaatttaattcaagaagctaggaatataaatattgaggagtttatgattattattattattttgatgttcaatgaagttttttttaatttcatatgaagtatacaaaaattcttcatagatttttgtttctatgccgtagttatctttaatatatttgtggttgaagaaatttattgctagaaacgaatggattgtcaatttttttttaaagcaaatatatatgaaattatactgtatattattttagtcatgattaaaatgtggccttaattgaatcatctttctcattcattttttcaaaagcatatcaggatgattgatatttatctattttaaaaattaatttaagggttcaaattaaatttaacttaaaagtgtcctaaccgtagttaaaggtttactttaaaaaaatactatgaaaaatctaatcttctatgaatcgaccgctgatcgatcgcggccgctggcgcgccagtactagctagtacccaattcgccctatagtgagtcgtattacaattcactggccgtcgttttacaacgtcgtgactgggaaaaccctggcgttacccaacttaatcgccttgcagcacatccccctttcgccagctggcgtaatagcgaagaggcccgcaccgatcgcccttcccaacagttgcgcagcctgaatggcgaatggaaattgtaagcgttaatattttgttaaaattcgcgttaaatttttgttaaatcagctcattttttaaccaataggccgaaatcggcaaaatcccttataaatcaaaagaatagaccgagatagggttgagtgttgttccagtttggaacaagagtccactattaaagaacgtggactccaacgtcaaagggcgaaaaaccgtctatcagggcgatggcccactacgtgaaccatcaccctaatcaagttttttggggtcgaggtgccgtaaagcactaaatcggaaccctaaagggagcccccgatttagagcttgacggggaaagccggcgaacgtggcgagaaaggaagggaagaaagcgaaaggagcgggcgctagggcgctggcaagtgtagcggtcacgctgcgcgtaaccaccacacccgccgcgcttaatgcgccgctacagggcgcgtcaggtggcacttttcggggaaatgtgcgcggaacccctatttgtttatttttctaaatacattcaaatatgtatccgctcatgagacaataaccctgataaatgcttcaataatattgaaaaaggaagagtatgagtattcaacatttccgtgtcgcccttattcccttttttgcggcattttgccttcctgtttttgctcacccagaaacgctggtgaaagtaaaagatgctgaagatcagttgggtgcacgagtgggttacatcgaactggatctcaacagcggtaagatccttgagagttttcgccccgaagaacgttttccaatgatgagcacttttaaagttctgctatgtggcgcggtattatcccgtattgacgccgggcaagagcaactcggtcgccgcatacactattctcagaatgacttggttgagt

SEQ ID NO: 52769 - DNA, 9747 bp, Artificial sequence
  pMON72472
ccgatcctacctgtcacttcatcaaaaggacagtagaaaaggaaggtggcacctacaaatgccatcattgcgataaaggaaaggctatcattcaagatgcctctgccgacagtggtcccaaagatggacccccacccacgaggagcatcgtggaaaaagaagacgttccaaccacgtcttcaaagcaagtggattgatgtgatacttccactgacgtaagggatgacgcacaatcccactatccttcgcaagacccttcctctatataaggaagttcatttcatttggagaggacacgctgaaatcaccagtctctctctacaagatcggggatctctagctagacgatcgtttcgcatgattgaacaagatggattgcacgcaggttctccggccgcttgggtggagaggctattcggctatgactgggcacaacagacaatcggctgctctgatgccgccgtgttccggctgtcagcgcaggggcgcccggttctttttgtcaagaccgacctgtccggtgccctgaatgaactgcaggacgaggcagcgcggctatcgtggctggccacgacgggcgttccttgcgcagctgtgctcgacgttgtcactgaagcgggaagggactggctgctattgggcgaagtgccggggcaggatctcctgtcatctcaccttgctcctgccgagaaagtatccatcatggctgatgcaatgcggcggctgcatacgcttgatccggctacctgcccattcgaccaccaagcgaaacatcgcatcgagcgagcacgtactcggatggaagccggtcttgtcgatcaggatgatctggacgaagagcatcaggggctcgcgccagccgaactgttcgccaggctcaaggcgcgcatgcccgacggcgaggatctcgtcgtgacccatggcgatgcctgcttgccgaatatcatggtggaaaatggccgcttttctggattcatcgactgtggccggctgggtgtggcggaccgctatcaggacatagcgttggctacccgtgatattgctgaagagcttggcggcgaatgggctgaccgcttcctcgtgctttacggtatcgccgctcccgattcgcagcgcatcgccttctatcgccttcttgacgagttcttctgagcgggactctggggttcgaagaattcccgatcgttcaaacatttggcaataaagtttcttaagattgaatcctgttgccggtcttgcgatgattatcatataatttctgttgaattacgttaagcatgtaataattaacatgtaatgcatgacgttatttatgagatgggtttttatgattagagtcccgcaattatacatttaatacgcgatagaaaacaaaatatagcgcgcaaactaggataaattatcgcgcgcggtgtcatctatgttactagatcggggatatcgcgtgtctttataattctttgatgaaccagatgcattttattaaccaattccatatacatataaatattaatcatatataattaatatcaattgggttagcaaaacaaatctagtctaggtgtgttttgctaattattgggggatagtgcaaaaagaaatctacgttctcaataattcagatagaaaacttaataaagtgagataatttacatagattgcttttatcctttgatatatgtgaaaccatgcatgatataaggaaaatagatagagaaataattttttacatcgttgaatatgtaaacaatttaattcaagaagctaggaatataaatattgaggagtttatgattattattattattttgatgttcaatgaagttttttttaatttcatatgaagtatacaaaaattcttcatagatttttgtttctatgccgtagttatctttaatatatttgtggttgaagaaatttattgctagaaacgaatggattgtcaatttttttttaaagcaaatatatatgaaattatactgtatattattttagtcatgattaaaatgtggccttaattgaatcatctttctcattcattttttcaaaagcatatcaggatgattgatatttatctattttaaaaattaatttaagggttcaaattaaatttaacttaaaagtgtcctaaccgtagttaaaggtttactttaaaaaaatactatgaaaaatctaatcttctatgaatcgaccgctgatcgatcgcggccgctggcgcgccctcgagaggcctcatctaagcccccatttggacgtgaatgtagacacgtcgaaataaagatttccgaattagaataatttgtttattgctttcgcctataaatacgacggatcgtaatttgtcgttttatcaaaatgtactttcattttataataacgctgcggacatctacatttttgaattgaaaaaaaattggtaattactctttctttttctccatattgaccatcatactcattgctgatccatgtagatttcccggacatgaagccatttacaattgaatatatcctgccgccgctgccgctttgcacccggtggagcttgcatgttggtttctacgcagaactgagccggttaggcagataatttccattgagaactgagccatgtgcaccttccccccaacacggtgagcgacggggcaacggagtgatccacatgggacttttcctagcttggctgccatttttggggtgaggccgttcgcggccgaggggcgcagcccctggggggatgggaggcccgcgttagcgggccgggagggttcgagaagggggggcaccccccttcggcgtgcgcggtcacgcgcacagggcgcagccctggttaaaaacaaggtttataaatattggtttaaaagcaggttaaaagacaggttagcggtggccgaaaaacgggcggaaacccttgcaaatgctggattttctgcctgtggacagcccctcaaatgtcaataggtgcgcccctcatctgtcagcactctgcccctcaagtgtcaaggatcgcgcccctcatctgtcagtagtcgcgcccctcaagtgtcaataccgcagggcacttatccccaggcttgtccacatcatctgtgggaaactcgcgtaaaatcaggcgttttcgccgatttgcgaggctggccagctccacgtcgccggccgaaatcgagcctgcccctcatctgtcaacgccgcgccgggtgagtcggcccctcaagtgtcaacgtccgcccctcatctgtcagtgagggccaagttttccgcgaggtatccacaacgccggcggccggccgcggtgtctcgcacacggcttcgacggcgtttctggcgcgtttgcagggccatagacggccgccagcccagcggcgagggcaaccagcccggtgagcgtcggaaagggtcgatcgaccgatgcccttgagagccttcaacccagtcagctccttccggtgggcgcggggcatgactacggtatcagctcactcaaaggcggtaatacggttatccacagaatcaggggataacgcaggaaagaacatgtgagcaaaaggccagcaaaaggccaggaaccgtaaaaaggccgcgttgctggcgtttttccataggctccgcccccctgacgagcatcacaaaaatcgacgctcaagtcagaggtggcgaaacccgacaggactataaagataccaggcgtttccccctggaagctccctcgtgcgctctcctgttccgaccctgccgcttaccggatacctgtccgcctttctcccttcgggaagcgtggcgctttctcatagctcacgctgtaggtatctcagttcggtgtaggtcgttcgctccaagctgggctgtgtgcacgaaccccccgttcagcccgaccgctgcgccttatccggtaactatcgtcttgagtccaacccggtaagacacgacttatcgccactggcagcagccactggtaacaggattagcagagcgaggtatgtaggcggtgctacagagttcttgaagtggtggcctaactacggctacactagaagaacagtatttggtatctgcgctctgctgaagccagttaccttcggaaaaagagttggtagctcttgatccggcaaacaaaccaccgctggtagcggtggtttttttgtttgcaagcagcagattacgcgcagaaaaaaaggatctcaagaagatcctttgatcttttctacggggtctgacgctcagtggaacgaaaactcacgttaagggattttggtcatgagggaagcggtgatcgccgaagtatcgactcaactatcagaggtagttggcgtcatcgagcgccatctcgaaccgacgttgctggccgtacatttgtacggctccgcagtggatggcggcctgaagccacacagtgatattgatttgctggttacggtgaccgtaaggcttgatgaaacaacgcggcgagctttgatcaacgaccttttggaaacttcggcttcccctggagagagcgagattctccgcgctgtagaagtcaccattgttgtgcacgacgacatcattccgtggcgttatccagctaagcgcgaactgcaatttggagaatggcagcgcaatgacattcttgcaggtatcttcgagccagccacgatcgacattgatctggctatcttgctgacaaaagcaagagaacatagcgttgccttggtaggtccagcggcggaggaactctttgatccggttcctgaacaggatctatttgaggcgctaaatgaaaccttaacgctatggaactcgccgcccgactgggctggcgatgagcgaaatgtagtgcttacgttgtcccgcatttggtacagcgcagtaaccggcaaaatcgcgccgaaggatgtcgctgccgactgggcaatggagcgcctgccggcccagtatcagcccgtcatacttgaagctaggcaggcttatcttggacaagaagatcgcttggcctcgcgcgcagatcagttggaagaatttgttcactacgtgaaaggcgagatcaccaaggtagtcggcaaataatgtctaacaattcgttcaagccgacgccgcttcgcggcgcggcttaactcaagcgttagatgctgcaggcatcgtggtgtcacgctcgtcgtttggtatggcttcattcagctccggttcccaacgatcaaggcgagttacatgatcccccatgttgtgcaaaaaagcggttagctccttcggtcctccgatcgaggatttttcggcgctgcgctacgtccgcgaccgcgttgagggatcaagccacagcagcccactcgaccttctagccgacccagacgagccaagggatctttttggaatgctgctccgtcgtcaggctttccgacgtttgggtggttgaacagaagtcattatcgcacggaatgccaagcactcccgaggggaaccctgtggttggcatgcacatacaaatggacgaacggataaaccttttcacgcccttttaaatatccgattattctaataaacgctcttttctcttaggtttacccgccaatatatcctgtcaaacactgatagtttaaacatgactctcttaaggtagccaaagccccggaattcggcgcgcctgcggccgcctcgaggtcattcatatgcttgagaagagagtcgggatagtccaaaataaaacaaaggtaagattacctggtcaaaagtgaaaacatcagttaaaaggtggtataaagtaaaatatcggtaataaaaggtggcccaaagtgaaatttactcttttctactattataaaaattgaggatgtttttgtcggtactttgatacgtcatttttgtatgaattggtttttaagtttattcgcttttggaaatgcatatctgtatttgagtcgggttttaagttcgtttgcttttgtaaatacagagggatttgtataagaaatatctttaaaaaaacccatatgctaatttgacataatttttgagaaaaatatatattcaggcgaattctcacaatgaacaataataagattaaaatagctttcccccgttgcagcgcatgggtattttttctagtaaaaataaaagataaacttagactcaaaacatttacaaaaacaacccctaaagttcctaaagcccaaagtgctatccacgatccatagcaagcccagcccaacccaacccaacccaacccaccccagtccagccaactggacaatagtctccacacccccccactatcaccgtgagttgtccgcacgcaccgcacgtctcgcagccaaaaaaaaaaaaagaaagaaaaaaaagaaaaagaaaaaacagcaggtgggtccgggtcgtgggggccggaaacgcgaggaggatcgcgagccagcgacgaggccggccctccctccgcttccaaagaaacgccccccatcgccactatatacatacccccccctctcctcccatccccccaaccctaccaccaccaccaccaccacctccacctcctcccccctcgctgccggacgacgagctcctcccccctccccctccgccgccgccgcgccggtaaccaccccgcccctctcctctttctttctccgttttttttttccgtctcggtctcgatctttggccttggtagtttgggtgggcgagaggcggcttcgtgcgcgcccagatcggtgcgcgggaggggcgggatctcgcggctggggctctcgccggcgtggatccggcccggatctcgcggggaatggggctctcggatgtagatctgcgatccgccgttgttgggggagatgatggggggtttaaaatttccgccatgctaaacaagatcaggaagaggggaaaagggcactatggtttatatttttatatatttctgctgcttcgtcaggcttagatgtgctagatctttctttcttctttttgtgggtagaatttgaatccctcagcattgttcatcggtagtttttcttttcatgatttgtgacaaatgcagcctcgtgcggagcttttttgtaggtagaccgcgggatatcacaagtttgtacaaaaaagctgaacgagaaacgtaaaatgatataaatatcaatatattaaattagattttgcataaaaaacagactacataatactgtaaaacacaacatatccagtcactatggcggccgcattaggcaccccaggctttacactttatgcttccggctcgtataatgtgtggattttgagttaggatccgtcgagattttcaggagctaaggaagctaaaatggagaaaaaaatcactggatataccaccgttgatatatcccaatggcatcgtaaagaacattttgaggcatttcagtcagttgctcaatgtacctataaccagaccgttcagctggatattacggcctttttaaagaccgtaaagaaaaataagcacaagttttatccggcctttattcacattcttgcccgcctgatgaatgctcatccggaattccgtatggcaatgaaagacggtgagctggtgatatgggatagtgttcacccttgttacaccgttttccatgagcaaactgaaacgttttcatcgctctggagtgaataccacgacgatttccggcagtttctacacatatattcgcaagatgtggcgtgttacggtgaaaacctggcctatttccctaaagggtttattgagaatatgtttttcgtctcagccaatccctgggtgagtttcaccagttttgatttaaacgtggccaatatggacaacttcttcgcccccgttttcaccatgggcaaatattatacgcaaggcgacaaggtgctgatgccgctggcgattcaggttcatcatgccgtttgtgatggcttccatgtcggcagaatgcttaatgaattacaacagtactgcgatgagtggcagggcggggcgtaaacgcgtggatccggcttactaaaagccagataacagtatgcgtatttgcgcgctgatttttgcggtataagaatatatactgatatgtatacccgaagtatgtcaaaaagaggtatgctatgaagcagcgtattacagtgacagttgacagcgacagctatcagttgctcaaggcatatatgatgtcaatatctccggtctggtaagcacaaccatgcagaatgaagcccgtcgtctgcgtgccgaacgctggaaagcggaaaatcaggaagggatggctgaggtcgcccggtttattgaaatgaacggctcttttgctgacgagaacaggggctggtgaaatgcagtttaaggtttacacctataaaagagagagccgttatcgtctgtttgtggatgtacagagtgatattattgacacgcccgggcgacggatggtgatccccctggccagtgcacgtctgctgtcagataaagtctcccgtgaactttacccggtggtgcatatcggggatgaaagctggcgcatgatgaccaccgatatggccagtgtgccggtctccgttatcggggaagaagtggctgatctcagccaccgcgaaaatgacatcaaaaacgccattaacctgatgttctggggaatataaatgtcaggctcccttatacacagccagtctgcaggtcgaccatagtgactggatatgttgtgttttacagtattatgtagtctgttttttatgcaaaatctaatttaatatattgatatttatatcattttacgtttctcgttcagctttcttgtacaaagtggtgatggggatcccccaccctgcaatgtgaccctagacttgtccatcttctggattggccaacttaattaatgtatgaaataaaaggatgcacacatagtgacatgctaatcactataatgtgggcatcaaagttgtgtgttatgtgtaattactaattatctgaataagagaaagagatcatccatatttcttatcctaaatgaatgtcacgtgtctttataattctttgatgaaccagatgcattttattaaccaattccatatacatataaatattaatcatatataattaatatcaattgggttagcaaaacaaatctagtctaggtgtgttttgctaattattgggggatagtgcaaaaagaaatctacgttctcaataattcagatagaaaacttaataaagtgagataatttacatagattgcttttatcctttgatatatgtgaaaccatgcatgatataaggaaaatagatagagaaataattttttacatcgttgaatatgtaaacaatttaattcaagaagctaggaatataaatattgaggagtttatgattattattattattttgatgttcaatgaagttttttttaatttcatatgaagtatacaaaaattcttcatagatttttgtttctatgccgtagttatctttaatatatttgtggttgaagaaatttattgctagaaacgaatggattgtcaatttttttttaaagcaaatatatatgaaattatactgtatattattttagtcatgattaaaatgtggccttaattgaatcatctttctcattcattttttcaaaagcatatcaggatgattgatatttatctattttaaaaattaatttaagggttcaaattaaatttaacttaaaagtgtcctaaccgtagttaaaggtttactttaaaaaaatactatgaaaaatctaatcttctatgaatcgacctgcaggatttaaatccatcgttctggggcctaacgggccaagcttt

SEQ ID NO: 52770 - DNA, 9754 bp, Artificial sequence
  pMON74532
gatggggatcagattgtcgtttcccgccttcagtttaaactatcagtgtttgacaggatatattggcgggtaaacctaagagaaaagagcgtttattagaataatcggatatttaaaagggcgtgaaaaggtttatccgttcgtccatttgtatgtgcatgccaaccacagggttcccctcgggagtgcttggcattccgtgcgataatgacttctgttcaaccacccaaacgtcggaaagcctgacgacggagcagcattccaaaaagatcccttggctcgtctgggtcggctagaaggtcgagtgggctgctgtggcttgatccctcaacgcggtcgcggacgtagcgcagcgccgaaaaatcctcgatcggaggaccgaaggagctaaccgcttttttgcacaacatgggggatcatgtaactcgccttgatcgttgggaaccggagctgaatgaagccataccaaacgacgagcgtgacaccacgatgcctgcagcatctaacgcttgagttaagccgcgccgcgaagcggcgtcggcttgaacgaattgttagacattatttgccgactaccttggtgatctcgcctttcacgtagtgaacaaattcttccaactgatctgcgcgcgaggccaagcgatcttcttgtccaagataagcctgcctagcttcaagtatgacgggctgatactgggccggcaggcgctccattgcccagtcggcagcgacatccttcggcgcgattttgccggttactgcgctgtaccaaatgcgggacaacgtaagcactacatttcgctcatcgccagcccagtcgggcggcgagttccatagcgttaaggtttcatttagcgcctcaaatagatcctgttcaggaaccggatcaaagagttcctccgccgctggacctaccaaggcaacgctatgttctcttgcttttgtcagcaagatagccagatcaatgtcgatcgtggctggctcgaagatacctgcaagaatgtcattgcgctgccattctccaaattgcagttcgcgcttagctggataacgccacggaatgatgtcgtcgtgcacaacaatggtgacttctacagcgcggagaatctcgctctctccaggggaagccgaagtttccaaaaggtcgttgatcaaagctcgccgcgttgtttcatcaagccttacggtcaccgtaaccagcaaatcaatatcactgtgtggcttcaggccgccatccactgcggagccgtacaaatgtacggccagcaacgtcggttcgagatggcgctcgatgacgccaactacctctgatagttgagtcgatacttcggcgatcaccgcttccctcatgatgtttaactcctgaattaagccgcgccgcgaagcggtgtcggcttgaatgaattgttaggcgtcatcctgtgctcccgacctgcagcaatggcaacaacgttgcgcaaactattaactggcgaactacttactctagcttcccggcaacaattaatagactggatggaggcggataaagttgcaggaccacttctgcgctcggcccttccggctggctggtttattgctgataaatctggagccggtgagcgtgggtctcgcggtatcattgcagcactggggccagatggtaagccctcccgtatcgtagttatctacacgacggggagtcaggcaactatggatgaacgaaatagacagatcgctgagataggtgcctcactgattaagcattggtaactgtcagaccaagtttactcatatatactttagattgatttaaaacttcatttttaatttaaaaggatctaggtgaagatcctttttgataatctcatgaccaaaatcccttaacgtgagttttcgttccactgagcgtcagaccccgtagaaaagatcaaaggatcttcttgagatcctttttttctgcgcgtaatctgctgcttgcaaacaaaaaaaccaccgctaccagcggtggtttgtttgccggatcaagagctaccaactctttttccgaaggtaactggcttcagcagagcgcagataccaaatactgtccttctagtgtagccgtagttaggccaccacttcaagaactctgtagcaccgcctacatacctcgctctgctaatcctgttaccagtggctgctgccagtggcgataagtcgtgtcttaccgggttggactcaagacgatagttaccggataaggcgcagcggtcgggctgaacggggggttcgtgcacacagcccagcttggagcgaacgacctacaccgaactgagatacctacagcgtgagctatgagaaagcgccacgcttcccgaagggagaaaggcggacaggtatccggtaagcggcagggtcggaacaggagagcgcacgagggagcttccagggggaaacgcctggtatctttatagtcctgtcgggtttcgccacctctgacttgagcgtcgatttttgtgatgctcgtcaggggggcggagcctatggaaaaacgccagcaacgcggcctttttacggttcctggccttttgctggccttttgctcacatgttctttcctgcgttatcccctgattctgtggataaccgtattaccgcctttgagtgagctgataccgctcgccgcagccgaacgaccgagcgcagcgagtcagtgagcgaggaagcggaagagcgcctgatgcggtattttctccttacgcatctgtgcggtatttcacaccgcatatggtgcactctcagtacaatctgctctgatgccgcatagttaagccagtatacactccgctatcgctacgtgactgggtcatggctgcgccccgacacccgccaacacccgctgacgcgccctgacgggcttgtctgctcccggcatccgcttacagacaagctgtgaccgtctccgggagctgcatgtgtcagaggttttcaccgtcatcaccgaaacgcgcgaggcagctgcggtaaagctcatcagcgtggtcgtgaagcgattcacagatgtctgcctgttcatccgcgtccagctcgttgagtttctccagaagcgttaatgtctggcttctgataaagcgggccatgttaagggcggttttttcctgtttggtcactgatgcctccgtgtaagggggatttctgttcatgggggtaatgataccgatgaaacgagagaggatgctcacgatacgggttactgatgatgaacatgcccggttactggaacgttgtgagggtaaacaactggcggtatggatgcggcgggaccagagaaaaatcactcagggtcaatgccagcgcttcgttaatacagatgtaggtgttccacagggtagccagcagcatcctgcgatgcagatccggaacataatggtgcagggcgctgacttccgcgtttccagactttacgaaacacggaaaccgaagaccattcatgttgttgctcaggtcgcagacgttttgcagcagcagtcgcttcacgttcgctcgcgtatcggtgattcattctgctaaccagtaaggcaaccccgccagcctagccgggtcctcaacgacaggagcacgatcatgcgcacccgtggccaggacccaacgctgcccgagatgcgccgcgtgcggctgctggagatggcggacgcgatggatatgttctgccaagggttggtttgcgcattcacagttctccgcaagaattgattggctccaattcttggagtggtgaatccgttagcgaggtgccgccggcttccattcaggtcgaggtggcccggctccatgcaccgcgacgcaacgcggggaggcagacaaggtatagggcggcgcctacaatccatgccaacccgttccatgtgctcgccgaggcggcataaatcgccgtgacgatcagcggtccaatgatcgaagttaggctggtaagagccgcgagcgatccttgaagctgtccctgatggtcgtcatctacctgcctggacagcatggcctgcaacgcgggcatcccgatgccgccggaagcgagaagaatcataatggggaaggccatccagcctcgcgtcgcgaacgccagcaagacgtagcccagcgcgtcggccgccatgccggcgataatggcctgcttctcgccgaaacgtttggtggcgggaccagtgacgaaggcttgagcgagggcgtgcaagattccgaataccgcaagcgacaggccgatcatcgtcgcgctccagcgaaagcggtcctcgccgaaaatgacccagagcgctgccggcacctgtcctacgagttgcatgataaagaagacagtcataagtgcggcgacgatagtcatgccccgcgcccaccggaaggagctgactgggttgaaggctctcaagggcatcggtcgatcgaccctttccgacgctcaccgggctggttgccctcgccgctgggctggcggccgtctatggccctgcaaacgcgccagaaacgccgtcgaagccgtgtgcgagacaccgcggccggccgccggcgttgtggatacctcgcggaaaacttggccctcactgacagatgaggggcggacgttgacacttgaggggccgactcacccggcgcggcgttgacagatgaggggcaggctcgatttcggccggcgacgtggagctggccagcctcgcaaatcggcgaaaacgcctgattttacgcgagtttcccacagatgatgtggacaagcctggggataagtgccctgcggtattgacacttgaggggcgcgactactgacagatgaggggcgcgatccttgacacttgaggggcagagtgctgacagatgaggggcgcacctattgacatttgaggggctgtccacaggcagaaaatccagcatttgcaagggtttccgcccgtttttcggccaccgctaacctgtcttttaacctgcttttaaaccaatatttataaaccttgtttttaaccagggctgcgccctgtgcgcgtgaccgcgcacgccgaaggggggtgcccccccttctcgaaccctcccggcccgctaacgcgggcctcccatccccccaggggctgcgcccctcggccgcgaacggcctcaccccaaaaatggcagccaagctaggaaaagtcccatgtggatcactccgttgccccgtcgctcaccgtgttggggggaaggtgcacatggctcagttctcaatggaaattatctgcctaaccggctcagttctgcgtagaaaccaacatgcaagctccaccgggtgcaaagcggcagcggcggcaggatatattcaattgtaaatggcttcatgtccgggaaatctacatggatcagcaatgagtatgatggtcaatatggagaaaaagaaagagtaattaccaattttttttcaattcaaaaatgtagatgtccgcagcgttattataaaatgaaagtacattttgataaaacgacaaattacgatccgtcgtatttataggcgaaagcaataaacaaattattctaattcggaaatctttatttcgacgtgtctacattcacgtccaaatgggggcttagatgagaaacttcacgatcgatgcggccaccactcgagaagcttactagtcaacaattggccaatctttgttctaaattgctaataaacgaccatttccgtcaattctccttggttgcaacagtctacccgtcaaatgtttactaatttataagtgtgaagtttgaattatgaaagacgaaatcgtattaaaaattcacaagaataaacaactccatagattttcaaaaaaacagtcacgagaaaaaaaccacagtccgtttgtctgctcttctagtttttattatttttctattaatagttttttgttatttcgagaataaaatttgaacgatgtccgaaccacaaaagccgagccgataaatcctaagccgagcctaactttagccgtaaccatcagtcacggctcccgggctaattcatttgaaccgaatcataatcaacggtttagatcaaactcaaaacaatctaacggcaacatagacgcgtcggtgagctaaaaagagtgtgaaagccaggtcaccatagcattgtctctcccagattttttatttgggaaataatagaagaaatagaaaaaaataaaagagtgagaaaaatcgtagagctatatattcgcacatgtactcgtttcgctttccttagtgttagctgctgccgctgttgtttctcctccatttctctatctttctctctcgctgcttctcgaatcttctgtatcatcttcttcttcttcaaggtgagtctctagatccgttcgcttgattttgctgctcgttagtcgttattgttgattctctatgccgatttcgctagatctgtttagcatgcgttgtggttttatgagaaaatctttgttttgggggttgcttgttatgtgattcgatccgtgcttgttggatcgatctgagctaattcttaaggtttatgtgttagatctatggagtttgaggattcttctcgcttctgtcgatctctcgctgttatttttgtttttttcagtgaagtgaagttgtttagttcgaaatgacttcgtgtatgctcgattgatctggttttaatcttcgatctgttaggtgttgatgtttacaagtgaattctagtgttttctcgttgagatctgtgaagtttgaacctagttttctcaataatcaacatatgaagcgatgtttgagtttcaataaacgctgctaatcttcgaaactaagttgtgatctgattcgtgtttacttcatgagcttatccaattcatttcggtttcattttactttttttttagtgaaccatggcgcaagttagcagaatctgcaatggtgtgcagaacccatctcttatctccaatctctcgaaatccagtcaacgcaaatctcccttatcggtttctctgaagacgcagcagcatccacgagcttatccgatttcgtcgtcgtggggattgaagaagagtgggatgacgttaattggctctgagcttcgtcctcttaaggtcatgtcttctgtttccacggcgtgcatgcttcatggagcttcatctaggccagctactgccaggaagtctagcgggctcagtggcaccgtgcgcatccctggcgataaaagtatttcacacaggagcttcatgttcggaggacttgctagtggagagacgagaatcactggtttgcttgagggcgaagatgttatcaacaccggtaaggcgatgcaagcaatgggtgccagaatccgaaaagagggcgatacgtggatcatcgacggtgttggtaacggaggattgctcgctcccgaagcgccacttgactttgggaacgcagctacggggtgccgtcttactatgggactggtaggcgtgtatgactttgactctaccttcatcggtgacgcgagcctcactaagagaccaatgggacgagtgctgaatcccctgagggagatgggtgtccaggtgaaatctgaggatggtgatcgtcttccggttactctgcgaggccccaagacccccacgccaatcacgtacagggttccgatggcgtcagcacaggtcaagtcagcggtactcctggcgggcctcaacacacctggaatcacaaccgtgattgaacccatcatgactagagaccacacggagaagatgttgcagggtttcggcgctaatctaacggtcgaaaccgacgccgacggcgtgaggacaatccgcttggagggcagaggtaaactgactggccaagtcatcgatgtgcctggagatccctcgtccacagcgtttcccctcgtagctgcgttgctcgtccctggatctgatgtgacgatcctgaatgtcctcatgaatccaactagaaccggcctcatcctcacattgcaggagatgggtgctgacatcgaggttatcaatcctaggttggcaggtggagaggatgtggccgatctgcgcgtgcgttctagtacactcaaaggcgtgaccgtccctgaggatcgcgctccatccatgatcgacgagtaccccattctcgccgttgctgctgcgtttgccgagggcgcaactgtaatgaacggccttgaggagttgagggttaaggagagtgacaggctgtccgcggtggcgaatggcctgaagctaaacggcgtggactgcgacgaaggtgaaacgtcccttgtagtccgtggtcgcccagacgggaaggggttggggaatgcttcgggagctgctgtggcgacgcaccttgatcatagaatcgccatgtcatttctggtgatgggacttgtctccgagaatccggtgaccgttgacgatgctaccatgatcgccacctcctttcctgagttcatggacctcatggcaggcttgggggccaagatcgagctgtctgatactaaggccgcttgaattcccgatcgttcaaacatttggcaataaagtttcttaagattgaatcctgttgccggtcttgcgatgattatcatataatttctgttgaattacgttaagcatgtaataattaacatgtaatgcatgacgttatttatgagatgggtttttatgattagagtcccgcaattatacatttaatacgcgatagaaaacaaaatatagcgcgcaaactaggataaattatcgcgcgcggtgtcatctatgttactagatcggggatcccacgtgcggaccgcctgcaggccgcgttatcaagctaactgcaggtccgatgtgagacttttcaacaaagggtaatatccggaaacctcctcggattccattgcccagctatctgtcactttattgtgaagatagtggaaaaggaaggtggctcctacaaatgccatcattgcgataaaggaaaggccatcgttgaagatgcctctgccgacagtggtcccaaagatggacccccacccacgaggagcatcgtggaaaaagaagacgttccaaccacgtcttcaaagcaagtggattgatgtgatggtccgattgagacttttcaacaaagggtaatatccggaaacctcctcggattccattgcccagctatctgtcactttattgtgaagatagtggaaaaggaaggtggctcctacaaatgccatcattgcgataaaggaaaggccatcgttgaagatgcctctgccgacagtggtcccaaagatggacccccacccacgaggagcatcgtggaaaaagaagacgttccaaccacgtcttcaaagcaagtggattgatgtgatatctccactgacgtaagggatgacgcacaatcccactatccttcgcaagacccttcctctatataaggaagttcatttcatttggagaggaccaggtggtaccggcgcgccaggcctggtagtctgattaattaagcgatcgcgggccctgatcacctgtcgtacagtatttctacatttgatgtgtgatttgtgaagaacatcaaacaaaacaagcactggctttaatatgatgataagtattatggtaattaattaattggcaaaaacaacaatgaagctaaaattttatttattgagccttgcggttaatttcttgtgatgatctttttttttattttctaattatatatagtttcctttgctttgaaatgctaaaggtttgagagagttatgctctttttttcttcctctttcttttttaactttatcatacaaattttgaataaaaatgtgagtacattgagctcatttaaataagctt

SEQ ID NO: 52771 - DNA, 477 bp, Oryza sativa
cgccgcgccggtaaccaccccgcccctctcctctttctttctccgttttttttttccgtctcggtctcgatctttggccttggtagtttgggtgggcgagaggcggcttcgtgcgcgcccagatcggtgcgcgggaggggcgggatctcgcggctggggctctcgccggcgtggatccggcccggatctcgcggggaatggggctctcggatgtagatctgcgatccgccgttgttgggggagatgatggggggtttaaaatttccgccatgctaaacaagatcaggaagaggggaaaagggcactatggtttatatttttatatatttctgctgcttcgtcaggcttagatgtgctagatctttctttcttctttttgtgggtagaatttgaatccctcagcattgttcatcggtagtttttcttttcatgatttgtgacaaatgcagcctcgtgcggagcttttttgtaggtaga

SEQ ID NO: 52772 - DNA, 463 bp, Oryza sativa
cgccggtaaccaccccgcccctctcctctttctttctccgttttttttttcgtctcggtctcgatctttggccttggtagtttgggtgggcgagagcggcttcgtcgcccagatcggtgcgcgggaggggcgggatctcgcggctggcgtctccgggcgtgagtcggcccggatcctcgcggggaatggggctctcggatgtagatctgatccgccgttgttgggggagatgatggggggtttaaaatttccgccatgctaaacaagatcaggaagaggggaaaagggcactatggtttatatttttatatatttctgctgcttcgtcaggcttagatgtgctagatctttctttcttctttttgtgggtagaatttgaatccctcagcattgttcatcggtagtttttcttttcatgatttgtgacaaatgcagcctcgtgcggagcttttttgtaggtaga

SEQ ID NO: 52773 - DNA, 804 bp, Zea mays
accgtcttcggtacgcgctcactccgccctctgcctttgttactgccacgtttctctgaatgctctcttgtgtggtgattgctgagagtggtttagctggatctagaattacactctgaaatcgtgttctgcctgtgctgattacttgccgtcctttgtagcagcaaaatatagggacatggtagtacgaaacgaagatagaacctacacagcaatacgagaaatgtgtaatttggtgcttagcggtatttatttaagcacatgttggtgttatagggcacttggattcagaagtttgctgttaatttaggcacaggcttcatactacatgggtcaatagtatagggattcatattataggcgatactataataatttgttcgtctgcagagcttattatttgccaaaattagatattcctattctgtttttgtttgtgtgctgttaaattgttaacgcctgaaggaataaatataaatgacgaaattttgatgtttatctctgctcctttattgtgaccataagtcaagatcagatgcacttgttttaaatattgttgtctgaagaaataagtactgacagtattttgatgcattgatctgcttgtttgttgtaacaaaatttaaaaataaagagtttcctttttgttgctctccttacctcctgatggtatctagtatctaccaactgacactatattgcttctctttacatacgtatcttgctcgatgccttctccctagtgttgaccagtgttactcacatagtctttgctcatttcattgtaatgcagataccaagcgg

SEQ ID NO: 52774 - DNA, 18 bp, Arabidopsis thaliana
cagtcacacaaagagtaa

SEQ ID NO: 52775 - DNA, 33 bp, Brassica rapa
aaaccaaaactcatcactacagaacatacacaa

SEQ ID NO: 52776 - DNA, 65 bp, Hordeum vulgare
catccatcgagagacgttcgcagcagcaaagagcacgcagcaactagctttcagttgtttcaacc

SEQ ID NO: 52777 - DNA, 74 bp, Oryza sativa
accaccaccaccaccaccacctcctcccccctcgctgccggacgacgagctcctcccccctccccctccgccgc

SEQ ID NO: 52778 - DNA, 80 bp, Oryza sativa
accaccaccaccaccaccacctccacctcctcccccctcgctgccggacgacgagctcctcccccctccccctccgccgc

SEQ ID NO: 52779 - DNA, 23 bp, Oryza sativa
acaaaaagcattcagttcattag

SEQ ID NO: 52780 - DNA, 93 bp, Zea mays
aaggaaggagaagaagacgagtgtcaagtgaacctgaaacttgcggtgtcactggctggtagcctgagtgtgagtgagtgatcgagctagctg

SEQ ID NO: 52781 - DNA, 151 bp, Zea mays
attctatatataccctcagtccctgttccagttctcgttaagctagcagcaccaagttgtcgaacacttgcctgctcttgagctcgatcaagctatcatcagctgcgtcttgcgcacagcaacagcttcccaactgcaaccgtagcagcca

SEQ ID NO: 52782 - DNA, 165 bp, Zea mays
cacccgttcgcctctcaccttttcgctgtactcactcgccacacacaccccctctccagctccgttggagctccggacagcagcaggcgcggggcggtcacgtagtaagcagctctcggctccctctccccttgctccatatgatcgtcgaacccatcgagctac

SEQ ID NO: 52783 - DNA, 61 bp, Zea mays
atcaccaccactgggtcttcagaccattagctttatctactccagagcgcagaagaacccg

SEQ ID NO: 52784 - DNA, 1696 bp, Arabidopsis thaliana
caaatttattatgtgttttttttccgtggtcgagattgtgtattattctttagttattacaagacttttagctaaaatttgaaagaatttactttaagaaaatcttaacatctgagataatttcagcaatagattatatttttcattactctagcagtatttttgcagatcaatcgcaacatatatggttgttagaaaaaatgcactatatatatatatattattttttcaattaaaagtgcatgatatataatatatatatatatatatatgtgtgtgtgtatatggtcaaagaaattcttatacaaatatacacgaacacatatatttgacaaaatcaaagtattacactaaacaatgagttggtgcatggccaaaacaaatatgtagattaaaaattccagcctccaaaaaaaaatccaagtgttgtaaagcattatatatatatagtagatcccaaatttttgtacaattccacactgatcgaatttttaaagttgaatatctgacgtaggatttttttaatgtcttacctgaccatttactaataacattcatacgttttcatttgaaatatcctctataattatattgaatttggcacataataagaaacctaattggtgatttattttactagtaaatttctggtgatgggctttctactagaaagctctcggaaaatcttggaccaaatccatattccatgacttcgattgttaaccctattagttttcacaaacatactatcaatatcattgcaacggaaaaggtacaagtaaaacattcaatccgatagggaagtgatgtaggaggttgggaagacaggcccagaaagagatttatctgacttgttttgtgtatagttttcaatgttcataaaggaagatggagacttgagaagttttttttggactttgtttagctttgttgggcgtttttttttttgatcaataactttgttgggcttatgatttgtaatattttcgtggactctttagtttatttagacgtgctaactttgttgggcttatgacttgttgtaacatattgtaacagatgacttgatgtgcgactaatctttacacattaaacatagttctgttttttgaaagttcttattttcatttttatttgaatgttatatatttttctatatttataattctagtaaaaggcaaattttgcttttaaatgaaaaaaatatatattccacagtttcacctaatcttatgcatttagcagtacaaattcaaaaatttcccatttttattcatgaatcataccattatatattaactaaatccaaggtaaaaaaaaggtatgaaagctctatagtaagtaaaatataaattccccataaggaaagggccaagtccaccaggcaagtaaaatgagcaagcaccactccaccatcacacaatttcactcatagataacgataagattcatggaattatcttccacgtggcattattccagcggttcaagccgataagggtctcaacacctctccttaggcctttgtggccgttaccaagtaaaattaacctcacacatatccacactcaaaatccaacggtgtagatcctagtccacttgaatctcatgtatcctagaccctccgatcactccaaagcttgttctcattgttgttatcattatatatagatgaccaaagcactagaccaaacct

SEQ ID NO: 52785 - DNA, 1711 bp, Brassica napa
atcactacaatgtcggagagacaaggctgcgccagcatatacaaaagggaaatgaagatggccttttgattagctgtgtagcatcagcagctaatctctgggctctcatcatggatgctggaactggattcacttctcaagtttatgagttgtcaccggtcttcctacacaaggtaataatcagttgaagcaattaagaatcaatttgatttgtagtaaactaagaagaacttaccttatgttttccccgcaggactggattatggaacaatgggaaaagaactactatataagctccatagctggttcagataacgggagctctttagttgttatgtcaaaaggttagtgtttagtgaataataaacttataccacaaagtcttcattgacttatttatatacttgttgtgaattgctaggaactacttattctcagcagtcatacaaagtgagtgactcatttccgttcaagtggataaataagaaatggaaagaagattttcatgtaacctccatgacaactgctggtaatcgttggggtgtggtaatgtcgaggaactctggcttctctgatcaggtaggtttttgtctcttattgtctggtgtttttattttcccctgatagtctaatatgataaactctgcgttgtgaaaggtggtggagcttgactttttgtacccaagcgatgggatacataggaggtgggagaatgggtatagaataacatcaatggcagcaactgcggatcaagcagctttcatattaagcataccaaagcgtaagatggtggatgaaactcaagagactctccgcaccaccgcctttccaagtactcatgtcaaggttggtttctttagctttgaacacagatttggatctttttgttttgtttccatatacttaggacctgagagcttttggttgatttttttttcaggacaaatgggcgaagaatctgtacattgcatcaatatgctatggcaggacagtgtgctgatacacacttaagcatcatgtggaaagccaaagacaattggagcgagactcagggtcgtcataataccaatcaaagacgtaaaaccagacgcaacctctttggttgaatgtaatgaaagggatgtgtcttggtatgtatgtacgaataacaaaagagaagatggaattagtagtagaaatatttgggagctttttaagcccttcaagtgtgctttttatcttattgatatcatccatttgcgttgtttaatgcgtctctagatatgttcctatatctttctcagtgtctgataagtgaaatgtgagaaaaccataccaaaccaaaatattcaaatcttatttttaataatgttgaatcactcggagttgccaccttctgtgccaattgtgctgaatctatcacactagaaaaaaacatttcttcaaggtaatgacttgtggactatgttctgaattctcattaagtttttattttctgaagtttaagtttttaccttctgttttgaaatatatcgttcataagatgtcacgccaggacatgagctacacatcgcacatagcatgcagatcaggacgatttgtcactcacttcaaacacctaagagcttctctctcacagcgcacacacatatgcatgcaatatttacacgtgatcgccatgcaaatctccattctcacctataaattagagcctcggcttcactctttactc

SEQ ID NO: 52786 - DNA, 613 bp, Cauliflower mosaic virus
ggtccgatgtgagacttttcaacaaagggtaatatccggaaacctcctcggattccattgcccagctatctgtcactttattgtgaagatagtggaaaaggaaggtggctcctacaaatgccatcattgcgataaaggaaaggccatcgttgaagatgcctctgccgacagtggtcccaaagatggacccccacccacgaggagcatcgtggaaaaagaagacgttccaaccacgtcttcaaagcaagtggattgatgtgatggtccgattgagacttttcaacaaagggtaatatccggaaacctcctcggattccattgcccagctatctgtcactttattgtgaagatagtggaaaaggaaggtggctcctacaaatgccatcattgcgataaaggaaaggccatcgttgaagatgcctctgccgacagtggtcccaaagatggacccccacccacgaggagcatcgtggaaaaagaagacgttccaaccacgtcttcaaagcaagtggattgatgtgatatctccactgacgtaagggatgacgcacaatcccactatccttcgcaagacccttcctctatataaggaagttcatttcatttggagagg

SEQ ID NO: 52787 - DNA, 838 bp, Hordeum valgare
catcgattttaaaaaaaagttcatacctttcaaaaacgttcatcaatttttttaaaaagttcactaaaaatgaaaaaaagttcatccaatttaaaaaaagttcattaattttttataaatttcaataaatttgaaaaaacttcataaaattcaacaaaagttcattgaagtgaaaaaagctcataaatctttaaaaagtgcatccattttcaaaaagatgttcatcaaaattcaatatagttcaccaatattcaaaaaagttcattaatcttaaaaaatattcgctaaaatttaaaaaatgtttatcaatatttaaacggcgtctagatgagccggtctatttacaaacaccataggcgccaattaacaaaaatgcacgttagatcacgtctacggcgtcaaataggaaatgcccatcggccttactattaagagttgttttggttatcctttaggatttatgctgtgggctggacttaacacaaaacccacagccatggtaggccggaatctattattcagctcacaaacgatgttctactcaaaagaagaaaaaaatctgttgtcagaaaaagagaacaaaaaaggctcacgaacatgccgcggctcgcacaggtggccgtgagcttctgaatgacttggccacccggcatgtccactgcccccctagacggtgtgggtgggtggacaggtcaagcgcattgaacaaggtcaccctgcgttctgccacgaggccaactgcgtggccctcatgcaacgcgccttgctgccacttctacacacgccctcgccggccgaccgctgctataaaagcagctccccgttgcgtcctcgacgg

SEQ ID NO: 52788 - DNA, 844 bp, Oryza sativa
ctcgaggtcattcatatgcttgagaagagagtcgggatagtccaaaataaaacaaaggtaagattacctggtcaaaagtgaaaacatcagttaaaaggtggtataaagtaaaatatcggtaataaaaggtggcccaaagtgaaatttactcttttctactattataaaaattgaggatgtttttgtcggtactttgatacgtcatttttgtatgaattggtttttaagtttattcgcttttggaaatgcatatctgtatttgagtcgggttttaagttcgtttgcttttgtaaatacagagggatttgtataagaaatatctttaaaaaaacccatatgctaatttgacataatttttgagaaaaatatatattcaggcgaattctcacaatgaacaataataagattaaaatagctttcccccgttgcagcgcatgggtattttttctagtaaaaataaaagataaacttagactcaaaacatttacaaaaacaacccctaaagttcctaaagcccaaagtgctatccacgatccatagcaagcccagcccaacccaacccaacccaacccaccccagtccagccaactggacaatagtctccacacccccccactatcaccgtgagttgtccgcacgcaccgcacgtctcgcagccaaaaaaaaaaaaagaaagaaaaaaaagaaaaagaaaaaacagcaggtgggtccgggtcgtgggggccggaaacgcgaggaggatcgcgagccagcgacgaggccggccctccctccgcttccaaagaaacgccccccatcgccactatatacatacccccccctctcctcccatccccccaaccct

SEQ ID NO: 52789 - DNA, 842 bp, Oryza sativa
tcgaggtcattcatatgcttgagaagagagtcgggatagtccaaaataaaacaaaggtaagattacctggtcaaaagtgaaaacatcagttaaaaggtggtataaagtaaaatatcggtaataaaaggtggcccaaagtgaaatttactcttttctactattataaaaattgaggatgtttttgtcggtactttgatacgtcatttttgtatgaattggtttttaagtttattcgcttttggaaatgcatatctgtatttgagtcgggttttaagttcgtttgcttttgtaaatacagagggatttgtataagaaatatctttaaaaaaacccatatgctaatttgacataatttttgagaaaaatatatattcaggcgaattctcacaatgaacaataataagattaaaatagctttcccccgttgcagcgcatgggtattttttctagtaaaaataaaagataaacttagactcaaaacatttacaaaaacaacccctaaagttcctaaagcccaaagtgctatccacgatccattagcaaggcccagcccaacccaacccaacccaacccaccccagtccagccaactggacaatagtctccacccccggcactatcaccgtgagttgtccgcaccaccgcacgtctcgcagccaaaaaaaaaaaaagaaagaaaaaaaagaaaaagaaaaacagcaggtgggtccgggtcgtgggggccggaaaagcgaggaggatcgcgagcagcgacgaggcccggccctccctccgcttccaaagaaacgccccccatcgccactatatacatacccccccctctcctcccatccccccaaccct

SEQ ID NO: 52790 - DNA, 1832 bp, Oryza sativa
cctctgttttgtttttcaccctcaatatttggaaacatttatctaggttgtttgtgtccaggcctataaatcatacatgatgttgtcgtattggatgtgaatgtggtggcgtgttcagtgccttggatttgagtttgatgagagttgcttctgggtcaccactcaccattatcgatgctcctcttcagcataaggtaaaagtcttccctgtttacgttattttacccactatggttgcttgggttggttttttcctgattgcttatgccatggaaagtcatttgatatgttgaacttgaattaactgtagaattgtatacatgttccatttgtgttgtacttccttcttttctattagtagcctcagatgagtgtgaaaaaaacagattatataacttgccctataaatcatttgaaaaaaatattgtacagtgagaaattgatatatagtgaatttttaagagcatgttttcctaaagaagtatatattttctatgtacaaaggccattgaagtaattgtagatacaggataatgtagactttttggacttacactgctacctttaagtaacaatcatgagcaatagtgttgcaatgatatttaggctgcattcgtttactctcttgatttccatgagcacgcttcccaaactgttaaactctgtgttttttgccaaaaaaaaatgtataggaaagttgcttttaaaaaatcatatcaatccattttttaagttatagctaatacttaattaatcatgcgctaataagtcactctgtttttcgtactagagagattgttttgaaccagcactcaagaacacagccttaacccagccaaataatgctacaacctaccagtccacacctcttgtaaagcatttgttgcatggaaaagctaagatgacagcaacctgttcaggaaaacaactgacaaggtcatagggagagggagcttttggaaaggtgccgtgcagttcaaacaattagttagcagtagggtgttggtttttgctcacagcaataagaagttaatcatggtgtaggcaacccaaataaaacaccaaaatatgcacaaggcagtttgttgtattctgtagtacagacaaaactaaaagtaatgaaagaagatgtggtgttagaaaaggaaacaatatcatgagtaatgtgtgagcattatgggaccacgaaataaaaagaacattttgatgagtcgtgtatcctcgatgagcctcaaaagttctctcaccccggataagaaacccttaagcaatgtgcaaagtttgcattctccactgacataatgcaaaataagatatcatcgatgacatagcaactcatgcatcatatcatgcctctctcaacctattcattcctactcatctacataagtatcttcagctaaatgttagaacataaacccataagtcacgtttgatgagtattaggcgtgacacatgacaaatcacagactcaagcaagataaagcaaaatgatgtgtacataaaactccagagctatatgtcatattgcaaaaagaggagagcttataagacaaggcatgactcacaaaaattcatttgcctttcgtgtcaaaaagaggagggctttacattatccatgtcatattgcaaaagaaagagagaaagaacaacacaatgctgcgtcaattatacatatctgtatgtccatcattattcatccacctttcgtgtaccacacttcatatatcatgagtcacttcatgtctggacattaacaaactctatcttaacatttagatgcaagagcctttatctcactataaatgcacgatgatttctcattgtttctc

SEQ ID NO: 52791 - DNA, 3072 bp, Oryza sativa
aggccatagagcacttccggacaatgatagagcttggacagaagccagatgagattacgtttataggtgttctttcagcatgctgtcatgctggtttggtgaaagaaggtcgggaatttttctctctgatggagacaaaatatcatcttgagaggaaaatgaaacattattcatgtatgatagacttactaggcagggcaggccatttagacgaagcagagcagctagtaaacactatgcctatggaacctgatgcagtagtttggggtgctatcttctttgcttgtaggatgcaaggtaatatctctcttggagaaaaggcagcaatgaaattggtagaaattgatcctagtgatagtggaatctatgtgctactggctaatatgtatgcagaagcgaacatgaggaagaaggctgacaaagtcagggctatgatgagacatttgggagtggagaaagttcctgggtgtagctgcattgagttgaatggtgtggttcatgaatttatcgtgaaggacaagtcacatatggatagtcatgctatttatgactgcttgcatgagatcaccctacaaataaagcatactgcagatttgcttagcatttctgcggctggtgcggtgtagtgttctgttggctggaacagctggctgagctgtgcaagatgatatgtgcagttgtgatgcacaattcacagatgcaggaactcgatcatgctgatttgtgctggtttgccaggccatgttctgagaagggtatacttcatgttgattactatctgaggcattccccgagaattttctggtcgttcttttgcagcttgatgtcaatggaaacaatatgttccactacatattgcaaagttcttgtatgctctttactcaaccctcacgtgcggagcacttcctgggtaagtgtggttctcatgctctgttttgcctcctccatttctcctccgttgcatttaaagtcacatccccctcctcaggttttctccattagctctctgtagtccttgctgtactctccttggtattccatgctgtcctactacttgcttcatccccttctacattttgttctggtttttggcctgcatttcggatcatgatgtatgtgatttccaatctgctgcaatatgaatggagactctgtgctaaccatcaacaacatgaaatgcttatgaggcctttgctgagcagccaatcttgcctgtgtttatgtcttcacaggccgaattcctctgttttgtttttcaccctcaatatttggaaacatttatctaggttgtttgtgtccaggcctataaatcatacatgatgttgtcgtattggatgtgaatgtggtggcgtgttcagtgccttggatttgagtttgatgagagttgcttctgggtcaccactcaccattatcgatgctcctcttcagcataaggtaaaagtcttccctgtttacgttattttacccactatggttgcttgggttggttttttcctgattgcttatgccatggaaagtcatttgatatgttgaacttgaattaactgtagaattgtatacatgttccatttgtgttgtacttccttcttttctattagtagcctcagatgagtgtgaaaaaaacagattatataacttgccctataaatcatttgaaaaaaatattgtacagtgagaaattgatatatagtgaatttttaagagcatgttttcctaaagaagtatatattttctatgtacaaaggccattgaagtaattgtagatacaggataatgtagactttttggacttacactgctacctttaagtaacaatcatgagcaatagtgttgcaatgatatttaggctgcattcgtttactctcttgatttccatgagcacgcttcccaaactgttaaactctgtgttttttgccaaaaaaaaatgtataggaaagttgcttttaaaaaatcatatcaatccattttttaagttatagctaatacttaattaatcatgcgctaataagtcactctgtttttcgtactagagagattgttttgaaccagcactcaagaacacagccttaacccagccaaataatgctacaacctaccagtccacacctcttgtaaagcatttgttgcatggaaaagctaagatgacagcaacctgttcaggaaaacaactgacaaggtcatagggagagggagcttttggaaaggtgccgtgcagttcaaacaattagttagcagtagggtgttggtttttgctcacagcaataagaagttaatcatggtgtaggcaacccaaataaaacaccaaaatatgcacaaggcagtttgttgtattctgtagtacagacaaaactaaaagtaatgaaagaagatgtggtgttagaaaaggaaacaatatcatgagtaatgtgtgagcattatgggaccacgaaataaaaagaacattttgatgagtcgtgtatcctcgatgagcctcaaaagttctctcaccccggataagaaacccttaagcaatgtgcaaagtttgcattctccactgacataatgcaaaataagatatcatcgatgacatagcaactcatgcatcatatcatgcctctctcaacctattcattcctactcatctacataagtatcttcagctaaatgttagaacataaacccataagtcacgtttgatgagtattaggcgtgacacatgacaaatcacagactcaagcaagataaagcaaaatgatgtgtacataaaactccagagctatatgtcatattgcaaaaagaggagagcttataagacaaggcatgactcacaaaaattcatttgcctttcgtgtcaaaaagaggagggctttacattatccatgtcatattgcaaaagaaagagagaaagaacaacacaatgctgcgtcaattatacatatctgtatgtccatcattattcatccacctttcgtgtaccacacttcatatatcatgagtcacttcatgtctggacattaacaaactctatcttaacatttagatgcaagagcctttatctcactataaatgcacgatgatttctcattgtttctc

SEQ ID NO: 52792 - DNA, 1160 bp, Zea mays
atgtgctggtgccccataaggtaggcacctaggtctgtgtttgaagcatcgacagatttgtaaacatgttcctatgaacctatttctgattgataatttgtcaaaactcatcatttgtcttcatccttgcctgcttgcgttcacgtgacaaagtacgtgtatgtcttcggcctttgctgtgtatgtttcgcattgcttagatgtggtgaaagaacatcagaagatgcattgatggcgtgcttaaaccagtgatgtgctccaggtgttcctgcagtctgcagagatatttactcttgtagtcttgttgacagcacagttgtatgtgatttcttggatgtaatgtaaaccaaatgaaagataggaacagttcgtcctcttccgtatacgaaggtcactgtatcatttgtcgtggcacaagatgatctgcaggcaggactgcaacatggtttcttggactgtcctgaatgcccgttcttgttctttagttgagccagagcagcagcctggtgtcggtgcctgagacctgacgaagcacacggcaaacaaacaagtcgcagcagctagcaggggcgttgccatcgccacaagcccccaagagacccgccgaggaaaagaaaaaaaaactacggccgccgttgccaagccgagcgtgcgaaccgatccacggatgggagatcagagatcacccaccgcaggcgggcggcagtggctggcgaggtgcgtccacagaacctgctgcaggtccctgtccgtcccggcgaccccttttctaggcgagcaactccccatggcagagctgcacgcagcagggcccgtcgttggttgcagctttaaccctttttgttttaaccatacaatgcagagtcgcagaggtgaaacaggacggaaattacagaaaagatggtggtgtgccagcagccccagcatgaagaagatcaggacaaaagaaaagcttgtgattggtgacagcaacaggattggattggagccaagctaggcagtgagaggcaggcagcaagacgcgtcagccactgaaatccagagggcaacctcggcctcacaactcatatccccttgtgctgttgcgcgccgtggttagccaggtgtgctgcaggcctcctccttgtttatatatgggagatgctctcaccctctaaggt

SEQ ID NO: 52793 - DNA, 523 bp, Zea mays
atcggaatattagcatgtcaacttgcactctctaaggctcctttggaaagcaggattttagaaaaaaaaatcatataaattttttacatgaatcagtttattttcggattatgaaatattttctcataacagtataacacatattttgtatataagttattatgttattatatataaccgttgcaacgtacgggcattcacctagtaaagaaagaagattaattattctctggtggagattgtgcccgagcccgaaggtcatgatatggacgttgcaaacccacttcacgaggggacaaaaaagaaatagggttaccactttcatcagttaaagggcgtgacatggacgtgttgaagatccggcacattccctgcgaaatatacacgtcatggtactaacgaggcatgaaactggccacatggccatggacgcgtgaagcgtgccatgcattggacatgcggcatccgaacttctgaagatcatatcagagagacactgatgtacgaactgccgtaacattct

SEQ ID NO: 52794 - DNA, 786 bp, Zea mays
gacatggaggtggaaggcctgacgtagatagagaagatgctcttagctttcattgtctttcttttgtagtcatctgatttacctctctcgtttatacaactggttttttaaacactccttaacttttcaaattgtctctttctttaccctagactagataattttaatggtgattttgctaatgtggcgccatgttagatagaggtaaaatgaactagttaaaagctcagagtgataaatcaggctctcaaaaattcataaactgttttttaaatatccaaatatttttacatggaaaataataaaatttagtttagtattaaaaaattcagttgaatatagttttgtcttcaaaaattatgaaactgatcttaattatttttccttaaaaccgtgctctatctttgatgtctagtttgagacgattatataattttttttgtgcttaactacgacgagctgaagtacgtagaaatactagtggagtcgtgccgcgtgtgcctgtagccactcgtacgctacagcccaagcgctagagcccaagaggccggaggtggaaggcgtcgcggcactatagccactcgccgcaagagcccaagagaccggagctggaaggatgagggtctgggtgttcacgaattgcctggaggcaggaggctcgtcgtccggagccacaggcgtggagacgtccgggataaggtgagcagccgctgcgataggggcgcgtgtgaaccccgtcgcgccccacggatggtataagaataaaggcattccgcgtgcaggatt

SEQ ID NO: 52795 - DNA, 786 bp, Zea mays
gacatggaggtggaaggcctgacgtagatagagaagatgctcttagctttcattgtctttcttttgtagtcatctgatttacctctctcgtttatacaactggttttttaaacactccttaacttttcaaattgtctctttctttaccctagactagataattttaatggtgattttgctaatgtggcgccatgttagatagaggtaaaatgaactagttaaaagctcagagtgataaatcaggctctcaaaaattcataaactgttttttaaatatccaaatatttttacatggaaaataataaaatttagtttagtattaaaaaattcagttgaatatagttttgtcttcaaaaattatgaaactgatcttaattatttttccttaaaaccgtgctctatctttgatgtctagtttgagacgattatataattttttttgtgcttaactacgacgagctgaagtacgtagaaatactagtggagtcgtgccgcgtgtgcctgtagccactcgtacgctacagcccaagcgctagagcccaagaggccggaggtggaaggcgtcgcggcactatagccactcgccgcaagagcccaagagaccggagctggaaggatgagggtctgggtgttcacgaattgcctggaggcaggaggctcgtcgtccggagccacaggcgtggagacgtccgggataaggtgagcagccgctgcgataggggcgcgtgtgaaccccgtcgcgccccacggatggtataagaataaaggcattccgcgtgcaggatc

SEQ ID NO: 52796 - DNA, 828 bp, Glycine max
ggcaaaaacatttaatacgtattatttaagaaaaaaatatgtaataatatatttatattttaatatctattcttatgtattttttaaaaatctattatatattgatcaactaaaatatttttatatctacacttattttgcatttttatcaattttcttgcgttttttggcatatttaataatgactattctttaataatcaatcattattcttacatggtacatattgttggaaccatatgaagtgtccattgcatttgactatgtggatagtgttttgatccaggcctccatttgccgcttattaattaatttggtaacagtccgtactaatcagttacttatccttcctccatcataattaatcttggtagtctcgaatgccacaacactgactagtctcttggatcataagaaaaagccaaggaacaaaagaagacaaaacacaatgagagtatcctttgcatagcaatgtctaagttcataaaattcaaacaaaaacgcaatcacacacagtggacatcacttatccactagctgatcaggatcgccgcgtcaagaaaaaaaaactggaccccaaaagccatgcacaacaacacgtactcacaaaggtgtcaatcgagcagcccaaaacattcaccaactcaacccatcatgagcccacacatttgttgtttctaacccaacctcaaactcgtattctcttccgccacctcatttttgtttatttcaacacccgtcaaactgcatgccaccccgtggccaaatgtccatgcatgttaacaagacctatgactataaatatctgcaatctcggcccaggttttc

SEQ ID NO: 52797 - DNA, 1039 bp, Zea mays
gtcccgcgtcaatattattaaaaaactcctacatttctttataatcaacccgcactcttataatctcttctctactactataataagagagtttatgtacaaaataaggtgaaattatgtataagtgttctggatattggttgttggctccatattcacacaacctaatcaatagaaaacatatgttttattaaaacaaaatttatcatatatcatatatatatatatacatatatatatatatatataaaccgtagcaatgcacgggcatataactagtgcaacttaatacatgtgtgtattaagatgaataagagggtatccaaataaaaaacttgttcgcttacgtctggatcgaaaggggttggaaacgattaaatctcttcctagtcaaaattgaatagaaggagatttaatctctcccaatccccttcgatcatccaggtgcaaccgtataagtcctaaagtggtgaggaacacgaaacaaccatgcattggcatgtaaagctccaagaatttgttgtatccttaacaactcacagaacatcaaccaaaattgcacgtcaagggtattgggtaagaaacaatcaaacaaatcctctctgtgtgcaaagaaacacggtgagtcatgccgagatcatactcatctgatatacatgcttacagctcacaagacattacaaacaactcatattgcattacaaagatcgtttcatgaaaaataaaataggccggacaggacaaaaatccttgacgtgtaaagtaaatttacaacaaaaaaaaagccatatgtcaagctaaatctaattcgttttacgtagatcaacaacctgtagaaggcaacaaaactgagccacgcagaagtacagaatgattccagatgaaccatcgacgtgctacgtaaagagagtgacgagtcatatacatttggcaagaaaccatgaagctgcctacagccgtctcggtggcataagaacacaagaaattgtgttaattaatcaaagctataaataacgctcgcatgcctgtgcacttctcc

SEQ ID NO: 52798 - DNA, 315 bp, Gossypium barbadense
tgatcacctgtcgtacagtatttctacatttgatgtgtgatttgtgaagaacatcaaacaaaacaagcactggctttaatatgatgataagtattatggtaattaattaattggcaaaaacaacaatgaagctaaaattttatttattgagccttgcggttaatttcttgtgatgatctttttttttattttctaattatatatagtttcctttgctttgaaatgctaaaggtttgagagagttatgctctttttttcttcctctttcttttttaactttatcatacaaattttgaataaaaatgtgagtacatt

SEQ ID NO: 52799 - DNA, 228 bp, Arabidopsis thaliana
atggcgcaagttagcagaatctgcaatggtgtgcagaacccatctcttatctccaatctctcgaaatccagtcaacgcaaatctcccttatcggtttctctgaagacgcagcagcatccacgagcttatccgatttcgtcgtcgtggggattgaagaagagtgggatgacgttaattggctctgagcttcgtcctcttaaggtcatgtcttctgtttccacggcgtgc

SEQ ID NO: 52800 - DNA, 943 bp, Solanum tuberosum
accctgcaatgtgaccctagacttgtccatcttctggattggccaacttaattaatgtatgaaataaaaggatgcacacatagtgacatgctaatcactataatgtgggcatcaaagttgtgtgttatgtgtaattactaattatctgaataagagaaagagatcatccatatttcttatcctaaatgaatgtcacgtgtctttataattctttgatgaaccagatgcattttattaaccaattccatatacatataaatattaatcatatataattaatatcaattgggttagcaaaacaaatctagtctaggtgtgttttgctaattattgggggatagtgcaaaaagaaatctacgttctcaataattcagatagaaaacttaataaagtgagataatttacatagattgcttttatcctttgatatatgtgaaaccatgcatgatataaggaaaatagatagagaaataattttttacatcgttgaatatgtaaacaatttaattcaagaagctaggaatataaatattgaggagtttatgattattattattattttgatgttcaatgaagttttttttaatttcatatgaagtatacaaaaattcttcatagatttttgtttctatgccgtagttatctttaatatatttgtggttgaagaaatttattgctagaaacgaatggattgtcaatttttttttaaagcaaatatatatgaaattatactgtatattattttagtcatgattaaaatgtggccttaattgaatcatctttctcattcattttttcaaaagcatatcaggatgattgatatttatctattttaaaaattaatttaagggttcaaattaaatttaacttaaaagtgtcctaaccgtagttaaaggtttactttaaaaaaatactatgaaaaatctaatcttctatgaatcga

SEQ ID NO: 52801 - DNA, 940 bp, Solanum tuberosum
accctgcaatgtgaccctagacttgtccatcttcggatggccaacttaattaatgtataaataaaaggatgcacacatagtgacatgctaatcactataatgtgggcatcaaagttgtgtgttatgtgtaattactaattatctgaataagagaaagagatcatccatatttcttatcctaaatgaatgtcacgtgtctttataattctttgatgaaccagatgcattttattaaccaattccatatacatataaatattaatcatatataattaatatcaattgggttagcaaaacaaatctagtctaggtgtgttttgctaattattgggggatagtgcaaaaagaaatctacgttctcaataattcagatagaaaacttaataaagtgagataatttacatagattgcttttatcctttgatatatgtgaaaccatgcatgatataaggaaaatagatagagaaataattttttacatcgttgaatatgtaaacaatttaattcaagaagctaggaatataaatattgaggagtttatgattattattattattttgatgttcaatgaagttttttttaatttcatatgaagtatacaaaaattcttcatagatttttgtttctatgccgtagttatctttaatatatttgtggttgaagaaatttattgctagaaacgaatggattgtcaatttttttttaaagcaaatatatatgaaattatactgtatattattttagtcatgattaaaatgtggccttaattgaatcatctttctcattcattttttcaaaagcatatcaggatgattgatatttatctattttaaaaattaatttaagggttcaaattaaatttaacttaaaagtgtcctaaccgtagttaaaggtttactttaaaaaaatactatgaaaaatctaatcttctatgaatcga

SEQ ID NO: 52802 - DNA, 13 bp, Glycine max
atcatcaagaacc

SEQ ID NO: 52803 - protein, 576 aa, Artificial sequence
  consensus
  misc_feature (18)..(18): location 18 can be His or Met
  misc_feature (19)..(19): location 19 can be Ile or His
  misc_feature (20)..(20): location 20 can be Asp or Thr
  misc_feature (21)..(21): location 21 can be Glu or Ser
  misc_feature (22)..(22): location 22 can be Val or Gly
  misc_feature (23)..(23): location 23 can be Ile or Ala
  misc_feature (24)..(24): location 24 can be Ala or Cys
  misc_feature (25)..(25): location 25 can be Asp or Pro
  misc_feature (26)..(26): location 26 can be Glu or Leu
  misc_feature (27)..(27): location 27 can be Glu or Pro
  misc_feature (28)..(28): location 28 can be Val or Glu
  misc_feature (29)..(29): location 29 can be Ala or Pro
  misc_feature (31)..(31): location 31 can be Trp or Met
  misc_feature (32)..(32): location 32 can be Ala or Ser
  misc_feature (33)..(33): location 33 can be Val or Ser
  misc_feature (34)..(34): location 34 can be Trp or Phe
  misc_feature (35)..(35): location 35 can be Arg or Ser
  misc_feature (36)..(36): location 36 can be Ala or Arg
  misc_feature (37)..(37): location 37 can be Lys or Ser
  misc_feature (38)..(38): location 38 can be Lys or Glu
  misc_feature (39)..(39): location 39 can be Leu or Ala
  misc_feature (40)..(40): location 40 can be Val or Arg
  misc_feature (41)..(41): location 41 can be Ser or Gly
  misc_feature (42)..(42): location 42 can be Asp or Gly
  misc_feature (43)..(43): location 43 can be Glu or Ala
  misc_feature (44)..(44): location 44 can be Val or Ser
  misc_feature (45)..(45): location 45 can be Val or Ala
  misc_feature (46)..(46): location 46 can be Ala or Phe
  misc_feature (47)..(47): location 47 can be His or Arg
  misc_feature (48)..(48): location 48 can be Val or Gly
  misc_feature (49)..(49): location 49 can be Ala or Thr
  misc_feature (51)..(51): location 51 can be Trp or Arg
  misc_feature (52)..(52): location 52 can be Val or Cys
  misc_feature (53)..(53): location 53 can be Ala or Phe
  misc_feature (54)..(54): location 54 can be Val or Cys
  misc_feature (55)..(55): location 55 can be Phe or Gly
  misc_feature (56)..(56): location 56 can be Val or Thr
  misc_feature (57)..(57): location 57 can be Ser or Thr
  misc_feature (59)..(59): location 59 can be Arg or Thr
  misc_feature (60)..(60): location 60 can be Pro or Leu
  misc_feature (61)..(61): location 61 can be Ile or Val
  misc_feature (62)..(62): location 62 can be Trp or Pro
  misc_feature (63)..(63): location 63 can be Asn or Arg
  misc_feature (64)..(64): location 64 can be Ser or Thr
  misc_feature (66)..(66): location 66 can be Ser or Thr
  misc_feature (67)..(67): location 67 can be Arg or Gly
  misc_feature (68)..(68): location 68 can be Asn or His
  misc_feature (69)..(69): location 69 can be Ala or Thr
  misc_feature (70)..(70): location 70 can be Asp or Thr
  misc_feature (71)..(71): location 71 can be Pro or Thr
  misc_feature (72)..(72): location 72 can be Ala or Arg
  misc_feature (73)..(73): location 73 can be Ile or Pro
  misc_feature (74)..(74): location 74 can be Val or Leu
  misc_feature (75)..(75): location 75 can be Val or Pro
  misc_feature (76)..(76): location 76 can be Pro or Arg
  misc_feature (78)..(78): location 78 can be Glu or Phe
  misc_feature (79)..(79): location 79 can be Leu or Cys
  misc_feature (80)..(80): location 80 can be Glu or Ser
  misc_feature (81)..(81): location 81 can be Glu or Arg
  misc_feature (82)..(82): location 82 can be Ile or Leu
  misc_feature (83)..(83): location 83 can be Ser or Gly
  misc_feature (84)..(84): location 84 can be Leu or Ser
  misc_feature (85)..(85): location 85 can be Ser or Thr
  misc_feature (86)..(86): location 86 can be Arg or Thr
  misc_feature (87)..(87): location 87 can be Leu or Arg
  misc_feature (88)..(88): location 88 can be Ile or Met
  misc_feature (89)..(89): location 89 can be Asp or Ser
  misc_feature (90)..(90): location 90 can be Leu or Thr
  misc_feature (91)..(91): location 91 can be Asp or Phe
  misc_feature (92)..(92): location 92 can be Ile or Gln
  misc_feature (93)..(93): location 93 can be Ser or Gly
  misc_feature (95)..(95): location 95 can be Ile or Thr
  misc_feature (96)..(96): location 96 can be Ile or Ser
  misc_feature (97)..(97): location 97 can be Asp or Ser
  misc_feature (99)..(99): location 99 can be Leu or Phe
  misc_feature (100)..(100): location 100 can be Tyr or Gly
  misc_feature (101)..(101): location 101 can be Pro or Phe
  misc_feature (102)..(102): location 102 can be Lys or Ser
  misc_feature (103)..(103): location 103 can be Leu or Pro or Met
  misc_feature (104)..(104): location 104 can be Leu or Ala
  misc_feature (105)..(105): location 105 can be Pro or Arg or Thr
  misc_feature (106)..(106): location 106 can be Ala or Phe or Gly
  misc_feature (107)..(107): location 107 can be Ile or Lys or Ser or Gly
  misc_feature (108)..(108): location 108 can be Ala or Arg or Ser or Thr
  misc_feature (109)..(109): location 109 can be Lys or Leu or Met or Ser or Gly
  misc_feature (110)..(110): location 110 can be Val or Lys or Leu or Met
  misc_feature (111)..(111): location 111 can be Ile or Val or Lys or Ala
  misc_feature (112)..(112): location 112 can be Asp or Lys or Glu or Gly
  misc_feature (113)..(113): location 113 can be Lys or Glu or Met or Gly
  misc_feature (114)..(114): location 114 can be Val or Glu or Pro or Ala or Ser or Gly
  misc_feature (115)..(115): location 115 can be Val or Lys or Glu or Ala or Ser
  misc_feature (116)..(116): location 116 can be Trp or Asp or Lys or Ala or Ser or Gly
  misc_feature (117)..(117): location 117 can be Lys or Ala or Thr or Gly
  misc_feature (118)..(118): location 118 can be Asp or Glu or Leu or Pro or Ala
  misc_feature (119)..(119): location 119 can be Val or Lys or Ala or Pro or Ser
  misc_feature (120)..(120): location 120 can be Asp or Leu or Ala or Gly
  misc_feature (121)..(121): location 121 can be Asn or Asp or Pro or Gly
  misc_feature (122)..(122): location 122 can be Pro or Ala
  misc_feature (123)..(123): location 123 can be Glu or Pro
  misc_feature (124)..(124): location 124 can be Ala or Phe or Ser or Thr
  misc_feature (125)..(125): location 125 can be Asp or Lys or Glu or Pro or Leu
  misc_feature (126)..(126): location 126 can be Glu or Pro or Gln
  misc_feature (128)..(128): location 128 can be Lys or Ser or Arg
  misc_feature (129)..(129): location 129 can be Ser or Arg
  misc_feature (130)..(130): location 130 can be Ala or Leu
  misc_feature (131)..(131): location 131 can be Lys or Ser or Arg
  misc_feature (132)..(132): location 132 can be Ser or Thr
  misc_feature (134)..(134): location 134 can be Ala or Thr
  misc_feature (135)..(135): location 135 can be Ile or Leu or Phe or Ser
  misc_feature (136)..(136): location 136 can be Asp or Ala or Ser
  misc_feature (137)..(137): location 137 can be Asn or Lys or Cys
  misc_feature (138)..(138): location 138 can be Lys or Gln or Gly
  misc_feature (139)..(139): location 139 can be Ile or Leu or Arg
  misc_feature (140)..(140): location 140 can be Leu or Arg
  misc_feature (141)..(141): location 141 can be Glu or Gln or Ser
  misc_feature (142)..(142): location 142 can be Asp or Glu or Arg
  misc_feature (143)..(143): location 143 can be Ile or Gly
  misc_feature (144)..(144): location 144 can be Asp or Glu or Ser or Thr
  misc_feature (145)..(145): location 145 can be Leu or Pro
  misc_feature (146)..(146): location 146 can be Ala or Ser
  misc_feature (147)..(147): location 147 can be Lys or Ala or Arg or Cys
  misc_feature (148)..(148): location 148 can be Lys or Pro or Ser or Cys
  misc_feature (149)..(149): location 149 can be Leu or Ser or Arg or His
  misc_feature (150)..(150): location 150 can be Val or Ala or His or Ser
  misc_feature (151)..(151): location 151 can be Val or Ala or Pro or His or Ser
  misc_feature (152)..(152): location 152 can be Asn or Leu
  misc_feature (153)..(153): location 153 can be Asn or Lys or Pro or Ala
  misc_feature (154)..(154): location 154 can be Pro or Met
  misc_feature (155)..(155): location 155 can be Gln or Ala or Ser or Thr
  misc_feature (157)..(157): location 157 can be Lys or Ala or Arg or Ser or Gly or Thr
  misc_feature (158)..(158): location 158 can be Val or Ala or Gln
  misc_feature (159)..(159): location 159 can be Val or Gln
  misc_feature (160)..(160): location 160 can be Ala or Leu or Arg or Ser or Thr
  misc_feature (161)..(161): location 161 can be Val or Lys or Arg
  misc_feature (162)..(162): location 162 can be Val or Leu or His
  misc_feature (163)..(163): location 163 can be Gln or His
  misc_feature (165)..(165): location 165 can be Lys or Arg or Cys or Thr
  misc_feature (167)..(167): location 167 can be Ile or Val
  misc_feature (168)..(168): location 168 can be Ile or Val
  misc_feature (169)..(169): location 169 can be Lys or Arg
  misc_feature (170)..(170): location 170 can be Lys or Pro or Arg
  misc_feature (171)..(171): location 171 can be Arg or Ser or Gly
  misc_feature (172)..(172): location 172 can be Gln or Gly
  misc_feature (173)..(173): location 173 can be Gln or Arg
  misc_feature (174)..(174): location 174 can be Lys or Arg
  misc_feature (175)..(175): location 175 can be Lys or Ser or Arg
  misc_feature (176)..(176): location 176 can be Asn or Ser or Cys or Gly
  misc_feature (178)..(178): location 178 can be Tyr or Phe
  misc_feature (186)..(186): location 186 can be Ile or Leu
  misc_feature (189)..(189): location 189 can be Ile or Val or Ala
  misc_feature (190)..(190): location 190 can be Ala or Ser
  misc_feature (191)..(191): location 191 can be Ala or Ser or Gly
  misc_feature (192)..(192): location 192 can be Ala or Gly
  misc_feature (196)..(196): location 196 can be Lys or Arg or Thr
  misc_feature (197)..(197): location 197 can be Ile or Val
  misc_feature (199)..(199): location 199 can be Asp or Glu
  misc_feature (201)..(201): location 201 can be Lys or Asp or Ala
  misc_feature (202)..(202): location 202 can be Asp or Arg
  misc_feature (204)..(204): location 204 can be Ser or Gly
  misc_feature (209)..(209): location 209 can be Val or Leu
  misc_feature (213)..(213): location 213 can be Asn or Asp or Glu
  misc_feature (218)..(218): location 218 can be Gln or Arg
  misc_feature (222)..(222): location 222 can be Leu or Phe
  misc_feature (225)..(225): location 225 can be Ile or His
  misc_feature (226)..(226): location 226 can be Val or Leu
  misc_feature (231)..(231): location 231 can be Lys or Arg
  misc_feature (237)..(237): location 237 can be any naturally occuring amino acid or Phe or Met
  misc_feature (238)..(238): location 238 can be Pro or Ser or Thr
  misc_feature (239)..(239): location 239 can be Lys or Arg
  misc_feature (240)..(240): location 240 can be Ser or Gly
  misc_feature (241)..(241): location 241 can be Ala or Thr or Gly
  misc_feature (242)..(242): location 242 can be Lys or Glu
  misc_feature (243)..(243): location 243 can be Asn or Ser or Gly
  misc_feature (245)..(245): location 245 can be any naturally occuring amino acid or Val or Leu or Met
  misc_feature (247)..(247): location 247 can be Asp or Glu
  misc_feature (249)..(249): location 249 can be Val or Tyr
  misc_feature (251)..(251): location 251 can be Asp or Glu
  misc_feature (252)..(252): location 252 can be Asn or Ser
  misc_feature (253)..(253): location 253 can be Leu or Met
  misc_feature (257)..(257): location 257 can be Pro or Ser
  misc_feature (258)..(258): location 258 can be Asp or Glu
  misc_feature (259)..(259): location 259 can be Ala or Ser
  misc_feature (260)..(260): location 260 can be Trp or Cys
  misc_feature (262)..(262): location 262 can be Ile or Val
  misc_feature (264)..(264): location 264 can be Arg or Thr
  misc_feature (265)..(265): location 265 can be Asn or Lys
  misc_feature (266)..(266): location 266 can be Asp or Glu
  misc_feature (267)..(267): location 267 can be Asp or Glu
  misc_feature (269)..(269): location 269 can be any naturally occuring amino acid or Asn
  misc_feature (271)..(271): location 271 can be Asp or Glu or Gln
  misc_feature (273)..(273): location 273 can be Leu or Ala or Ser
  misc_feature (274)..(274): location 274 can be Lys or Arg or Thr
  misc_feature (276)..(276): location 276 can be Asp or Glu
  misc_feature (279)..(279): location 279 can be Asn or Lys or Pro
  misc_feature (281)..(281): location 281 can be Leu or Phe or Met
  misc_feature (282)..(282): location 282 can be Tyr or Gln or Ala or His or Ser
  misc_feature (283)..(283): location 283 can be Asn or Pro or Leu
  misc_feature (284)..(284): location 284 can be Asp or Glu or Ala or Gln or Thr
  misc_feature (285)..(285): location 285 can be Ala or Gly
  misc_feature (286)..(286): location 286 can be Glu or His or Arg
  misc_feature (287)..(287): location 287 can be Asn or Gln or Met
  misc_feature (288)..(288): location 288 can be any naturally occuring amino acid or Glu or Ala or Ser or Gly or Thr
  misc_feature (289)..(289): location 289 can be any Ala or Thr
  misc_feature (290)..(290): location 290 can be Val or Thr
  misc_feature (291)..(291): location 291 can be Glu or Ala
  misc_feature (292)..(292): location 292 can be Asp or Glu
  misc_feature (293)..(293): location 293 can be Tyr or Val or Phe or Ser or Cys
  misc_feature (296)..(296): location 296 can be Lys or Gln or Arg
  misc_feature (300)..(300): location 300 can be Ala or Gly
  misc_feature (301)..(301): location 301 can be Ala or Gly
  misc_feature (302)..(302): location 302 can be Ala or Ser or Gly
  misc_feature (303)..(303): location 303 can be Ile or Ala or Ser or Cys
  misc_feature (304)..(304): location 304 can be Asp or Ala or Ser or Gly
  misc_feature (305)..(305): location 305 can be Val or Glu or Ala or Ser
  misc_feature (306)..(306): location 306 can be Val or Lys or Ala
  misc_feature (307)..(307): location 307 can be Val or Ser or Thr
  misc_feature (308)..(308): location 308 can be Asn or Ala or Ser or Thr or Gly
  misc_feature (314)..(314): location 314 can be Lys or Thr
  misc_feature (315)..(315): location 315 can be Val or Gln or Leu or Met
  misc_feature (316)..(316): location 316 can be Ala or Gly
  misc_feature (317)..(317): location 317 can be Val or Ser or Thr
  misc_feature (318)..(318): location 318 can be Ile or Val or Pro or Ser
  misc_feature (319)..(319): location 319 can be Asn or Lys or Glu or Arg
  misc_feature (320)..(320): location 320 can be Ile or Lys or Ala or Thr
  misc_feature (321)..(321): location 321 can be Asn or Lys or Pro or Gly
  misc_feature (322)..(322): location 322 can be Ile or Pro or Arg or Ser
  misc_feature (323)..(323): location 323 can be Lys or Gln
  misc_feature (324)..(324): location 324 can be Lys or Glu or Gln or Pro or Arg
  misc_feature (325)..(325): location 325 can be Glu or Ala or Thr
  misc_feature (326)..(326): location 326 can be Ile or Asp or Ala or Thr
  misc_feature (327)..(327): location 327 can be Val or Ala or Ser or Arg or Thr
  misc_feature (328)..(328): location 328 can be Glu or Pro or Gly
  misc_feature (329)..(329): location 329 can be Gln or Pro or Ser or Thr
  misc_feature (330)..(330): location 330 can be Asp or Glu or Leu or Arg
  misc_feature (331)..(331): location 331 can be Ser or Thr
  misc_feature (333)..(333): location 333 can be Lys or Glu
  misc_feature (334)..(334): location 334 can be Ile or Tyr or Val or Phe or Thr
  misc_feature (335)..(335): location 335 can be Asp or Glu or Pro or Ala
  misc_feature (336)..(336): location 336 can be Asn or Ser or Met or Thr
  misc_feature (337)..(337): location 337 can be Asp or Glu
  misc_feature (338)..(338): location 338 can be Ile or Asp or Glu or Ala
  misc_feature (339)..(339): location 339 can be Ile or Val or Asp
  misc_feature (340)..(340): location 340 can be Ala or Leu or Ser
  misc_feature (341)..(341): location 341 can be Pro or Ser
  misc_feature (342)..(342): location 342 can be Asp or Glu
  misc_feature (343)..(343): location 343 can be Asn or Asp or Ser
  misc_feature (344)..(344): location 344 can be Glu or Ser or Gly
  misc_feature (345)..(345): location 345 can be Ile or Asn or Asp or Glu
  misc_feature (346)..(346): location 346 can be Asn or Val or Leu or Phe or His
  misc_feature (347)..(347): location 347 can be Lys or Leu or Arg or Met
  misc_feature (348)..(348): location 348 can be Lys or Asp or Glu
  misc_feature (349)..(349): location 349 can be Asp or Glu
  misc_feature (350)..(350): location 350 can be Ile or Asn or Asp or Lys or Thr
  misc_feature (351)..(351): location 351 can be Asn or Ile or Lys or Gly
  misc_feature (352)..(352): location 352 can be Glu or Gln or Thr
  misc_feature (353)..(353): location 353 can be Val or Leu or Gln
  misc_feature (354)..(354): location 354 can be Val or Ser or Thr
  misc_feature (355)..(355): location 355 can be Pro or Met or Thr
  misc_feature (356)..(356): location 356 can be Pro or Ser
  misc_feature (363)..(363): location 363 can be Ile or Val
  misc_feature (364)..(364): location 364 can be Asp or Gln or Gly
  misc_feature (365)..(365): location 365 can be Val or Ala or Thr
  misc_feature (366)..(366): location 366 can be Pro or Thr
  misc_feature (367)..(367): location 367 can be Val or Pro or Ser
  misc_feature (368)..(368): location 368 can be Val or Arg
  misc_feature (369)..(369): location 369 can be Gln or Arg
  misc_feature (370)..(370): location 370 can be Lys or Gln or His or Ser
  misc_feature (371)..(371): location 371 can be Ala or Ser
  misc_feature (372)..(372): location 372 can be Ala or Gln or Arg or Thr
  misc_feature (373)..(373): location 373 can be Asn or Arg
  misc_feature (374)..(374): location 374 can be Asn or Ala or Thr
  misc_feature (375)..(375): location 375 can be Ala or Ser or Gly
  misc_feature (376)..(376): location 376 can be Lys or Gly
  misc_feature (377)..(377): location 377 can be Lys or Thr
  misc_feature (378)..(378): location 378 can be Lys or Ala or Leu or Ser or Thr
  misc_feature (379)..(379): location 379 can be Tyr or Lys or Leu or Phe
  misc_feature (380)..(380): location 380 can be Asn or Lys or Gln or Arg
  misc_feature (381)..(381): location 381 can be Val or Tyr or any naturally occuring amino acid or Phe
  misc_feature (382)..(382): location 382 can be Ala or Thr
  misc_feature (383)..(383): location 383 can be Asp or Glu
  misc_feature (384)..(384): location 384 can be Ile or Leu or Thr
  misc_feature (385)..(385): location 385 can be Ala or Ser
  misc_feature (386)..(386): location 386 can be Pro or Ser or Gly
  misc_feature (387)..(387): location 387 can be Glu or Gly
  misc_feature (388)..(388): location 388 can be Asn or Asp or Ala or Gly
  misc_feature (389)..(389): location 389 can be Asp or any naturally occuring amino acid or Glu or Ser
  misc_feature (390)..(390): location 390 can be Ala or Ser
  misc_feature (391)..(391): location 391 can be Glu or Ser or Gly
  misc_feature (392)..(392): location 392 can be Asp or Glu or Ser
  misc_feature (393)..(393): location 393 can be Asn or Asp or Ser
  misc_feature (394)..(394): location 394 can be Asn or Asp or Glu or Ser or Thr
  misc_feature (395)..(395): location 395 can be Asn or Asp or Glu or Pro or Gly
  misc_feature (396)..(396): location 396 can be Asn or Asp or any naturally occuring amino acid or Glu
  misc_feature (397)..(397): location 397 can be Ile or Leu or Thr
  misc_feature (398)..(398): location 398 can be Asp or Ser
  misc_feature (399)..(399): location 399 can be Ile or Val or Asp or Phe
  misc_feature (400)..(400): location 400 can be Asp or Glu or Ala or Pro or His or Ser
  misc_feature (402)..(402): location 402 can be Asp or Glu
  misc_feature (403)..(403): location 403 can be Lys or Glu or Leu or Met
  misc_feature (404)..(404): location 404 can be Val or Asp or Lys
  misc_feature (405)..(405): location 405 can be Asp or Glu or Ala or Pro
  misc_feature (406)..(406): location 406 can be Val or Lys or Glu or Leu or Thr
  misc_feature (407)..(407): location 407 can be Val or Glu or Leu
  misc_feature (408)..(408): location 408 can be Val or Asp or Glu or Met
  misc_feature (409)..(409): location 409 can be any naturally occuring amino acid or Lys or Glu or Pro or Thr
  misc_feature (410)..(410): location 410 can be Asp or Glu or Ala or Ser or Gly
  misc_feature (411)..(411): location 411 can be Val or Ala or Pro or Ser
  misc_feature (412)..(412): location 412 can be Asn or Glu or Gln or Ala or Ser
  misc_feature (413)..(413): location 413 can be Ile or Val or Asp or Thr
  misc_feature (414)..(414): location 414 can be Lys or His or Arg
  misc_feature (415)..(415): location 415 can be Asn or Lys or Asp or Ser or Gly
  misc_feature (416)..(416): location 416 can be Val or Glu or Ser or Arg
  misc_feature (417)..(417): location 417 can be Ile or Glu or Ser
  misc_feature (418)..(418): location 418 can be Lys or Glu or Pro or Gln
  misc_feature (419)..(419): location 419 can be Lys or Glu or Ser or Gly
  misc_feature (420)..(420): location 420 can be Lys or Glu or Pro or Gln
  misc_feature (421)..(421): location 421 can be Asp or Gln or Thr
  misc_feature (422)..(422): location 422 can be Ile or Val or Ala or Gly
  misc_feature (423)..(423): location 423 can be Asn or Val or Asp or Lys
  misc_feature (424)..(424): location 424 can be Ile or Glu or Pro or Phe or Gly
  misc_feature (425)..(425): location 425 can be Ile or Val or Asp or Lys or Ala or Thr
  misc_feature (426)..(426): location 426 can be Lys or Asp or Leu or Thr
  misc_feature (427)..(427): location 427 can be Trp or Asp or Ala or Ser
  misc_feature (428)..(428): location 428 can be Asp or Gln or Ser
  misc_feature (429)..(429): location 429 can be Val or Glu or Ala or Thr
  misc_feature (430)..(430): location 430 can be Ile or Asp or Lys or Gln or Ser or Gly
  misc_feature (431)..(431): location 431 can be Asp or Lys or Pro or Ser or Thr
  misc_feature (432)..(432): location 432 can be Ile or Ala or Leu or Phe
  misc_feature (433)..(433): location 433 can be Asn or Pro or Ser
  misc_feature (434)..(434): location 434 can be Val or Glu or Pro or Ala or Ser or Thr
  misc_feature (435)..(435): location 435 can be Asp or Lys or Glu
  misc_feature (436)..(436): location 436 can be Asp or Lys or Gln or Leu
  misc_feature (437)..(437): location 437 can be Glu or Pro
  misc_feature (438)..(438): location 438 can be Pro or Ala
  misc_feature (439)..(439): location 439 can be Lys or Ala or Leu
  misc_feature (440)..(440): location 440 can be Ile or Val or Lys or Glu or Arg
  misc_feature (441)..(441): location 441 can be Asn or Glu or Gln or Ser
  misc_feature (442)..(442): location 442 can be Asn or Lys or Leu or Ala or Thr
  misc_feature (443)..(443): location 443 can be Glu or Pro or Leu or Ser or Thr
  misc_feature (444)..(444): location 444 can be Ile or Asn or Lys or Leu or Ser
  misc_feature (445)..(445): location 445 can be Lys or Ala or Ser
  misc_feature (446)..(446): location 446 can be Lys or Ser
  misc_feature (447)..(447): location 447 can be Asp or Pro or Arg or Met
  misc_feature (448)..(448): location 448 can be Pro or Leu or Phe or Ser or Gly
  misc_feature (449)..(449): location 449 can be Ile or any naturally occuring amino acid or Lys
  misc_feature (450)..(450): location 450 can be Lys or Leu or Ser or Arg or Cys
  misc_feature (451)..(451): location 451 can be Val or Lys or Ala
  misc_feature (452)..(452): location 452 can be Glu or Gln or Gly
  misc_feature (453)..(453): location 453 can be Val or Glu or Ala or Arg
  misc_feature (454)..(454): location 454 can be Asn or Lys or Ser or Cys or Thr
  misc_feature (455)..(455): location 455 can be Val or Lys or Gln or Leu
  misc_feature (456)..(456): location 456 can be Asn or Ala or Arg or Ser
  misc_feature (457)..(457): location 457 can be Asn or Leu or Ala or Ser or Cys
  misc_feature (458)..(458): location 458 can be Gln or Leu or Ser or Thr
  misc_feature (459)..(459): location 459 can be Val or Ala or Gln or Phe or Arg
  misc_feature (460)..(460): location 460 can be any naturally occuring amino acid or Lys or Arg or Ser
  misc_feature (461)..(461): location 461 can be Val or Lys or Ala or Pro
  misc_feature (462)..(462): location 462 can be Asn or Lys or Ala or Ser or His
  misc_feature (463)..(463): location 463 can be Glu or Leu or Gln or Thr or Gly
  misc_feature (464)..(464): location 464 can be Lys or Glu or Leu or Gln or Ser
  misc_feature (465)..(465): location 465 can be Val or Lys or Pro
  misc_feature (466)..(466): location 466 can be Lys or Leu or Ala or Thr
  misc_feature (467)..(467): location 467 can be Val or Ala or Ser or Arg or Thr
  misc_feature (468)..(468): location 468 can be Asp or Lys or Pro or Ser or Gly
  misc_feature (469)..(469): location 469 can be Asn or Val or Pro or Gly or Thr
  misc_feature (470)..(470): location 470 can be Ile or Pro or Ala or Arg or His or Ser
  misc_feature (471)..(471): location 471 can be Val or Lys or Ala or Ser or Gly
  misc_feature (472)..(472): location 472 can be Val or Ala or Ser or Arg
  misc_feature (473)..(473): location 473 can be Lys or Leu or His
  misc_feature (474)..(474): location 474 can be Val or Lys or Leu or Ser
  misc_feature (475)..(475): location 475 can be any naturally occuring amino acid or Pro or Gln or Phe or Ser
  misc_feature (476)..(476): location 476 can be any naturally occuring amino acidor Ala or Arg or Ser
  misc_feature (477)..(477): location 477 can be Lys or Leu or Ala or Thr or Gly
  misc_feature (478)..(478): location 478 can be Ile or Leu or Ala or Ser
  misc_feature (479)..(479): location 479 can be Tyr or Ala or Pro or Ser
  misc_feature (480)..(480): location 480 can be Glu or Pro or Ala or Gln or Met or Thr
  misc_feature (481)..(481): location 481 can be Tyr or Lys or Glu or Leu or Ala or His
  misc_feature (482)..(482): location 482 can be Tyr or Lys or Phe
  misc_feature (483)..(483): location 483 can be Lys or Gln or Ser or His or Gly
  misc_feature (484)..(484): location 484 can be Lys or Pro or Arg
  misc_feature (485)..(485): location 485 can be Val or Lys or Pro or Ala or Thr
  misc_feature (486)..(486): location 486 can be Trp or Glu or Cys or Gly
  misc_feature (487)..(487): location 487 can be Ile or Lys or Glu or Ser
  misc_feature (489)..(489): location 489 can be Lys or Ala or Arg or Ser or Thr
  misc_feature (490)..(490): location 490 can be Val or Lys or Ala or Thr or Gly
  misc_feature (491)..(491): location 491 can be Lys or Pro or Leu or Ser or Gly
  misc_feature (492)..(492): location 492 can be Gln or Arg or Thr or Cys or Gly
  misc_feature (493)..(493): location 493 can be Glu or Ser or Thr
  misc_feature (494)..(494): location 494 can be Val or Pro or Gln or Ser or Arg
  misc_feature (495)..(495): location 495 can be Lys or Pro or Arg or Gly
  misc_feature (496)..(496): location 496 can be Lys or Arg or Ser or Gly
  misc_feature (497)..(497): location 497 can be Asn or Val or Lys or Ser or Arg or Thr
  misc_feature (498)..(498): location 498 can be Val or Lys or Pro or Leu or Ser
  misc_feature (499)..(499): location 499 can be Pro or Ser or His or Arg or Thr
  misc_feature (500)..(500): location 500 can be Lys or Leu or Pro or Gln or Ser
  misc_feature (501)..(501): location 501 can be Ile or Val or Lys or Gln
  misc_feature (502)..(502): location 502 can be Asn or Glu or Ala or Gly
  misc_feature (503)..(503): location 503 can be Tyr or Asp or Glu or Leu
  misc_feature (504)..(504): location 504 can be Asp or Leu or Gly
  misc_feature (505)..(505): location 505 can be Lys or Glu or Gln or Ala
  misc_feature (506)..(506): location 506 can be Ile or Lys or Arg
  misc_feature (507)..(507): location 507 can be Glu or Ser
  misc_feature (508)..(508): location 508 can be Val or Glu or Gln or His
  misc_feature (509)..(509): location 509 can be Pro or Leu or Ser
  misc_feature (510)..(510): location 510 can be Ala or Leu or Ser
  misc_feature (511)..(511): location 511 can be Leu or Ser or Gly
  misc_feature (512)..(512): location 512 can be Val or Ser
  misc_feature (513)..(513): location 513 can be Lys or Gln or Ser
  misc_feature (514)..(514): location 514 can be Lys or Gln or Arg
  misc_feature (515)..(515): location 515 can be Val or Lys or Asp or Glu
  misc_feature (516)..(516): location 516 can be Ile or Asn or Val or Arg
  misc_feature (517)..(517): location 517 can be Asn or Asp or Leu or Pro
  misc_feature (518)..(518): location 518 can be Ile or Val or Leu or Ala or Ser
  misc_feature (519)..(519): location 519 can be Trp or Asp or Ser
  misc_feature (520)..(520): location 520 can be Asp or Glu or Leu or Gln
  misc_feature (521)..(521): location 521 can be Asn or Asp or Leu or Gly
  misc_feature (522)..(522): location 522 can be Ile or Phe or Ser
  misc_feature (523)..(523): location 523 can be Lys or Asp or Leu
  misc_feature (524)..(524): location 524 can be Lys or Glu or Phe or Thr
  misc_feature (525)..(525): location 525 can be Asp or Leu or Ala or Arg
  misc_feature (526)..(526): location 526 can be Tyr or Trp or Ala or Phe
  misc_feature (527)..(527): location 527 can be Asp or Ala or Phe or Arg
  misc_feature (528)..(528): location 528 can be Ile or Lys or Glu or Arg
  misc_feature (529)..(529): location 529 can be Ile or Ser or Thr
  misc_feature (531)..(531): location 531 can be Asp or Thr
  misc_feature (532)..(532): location 532 can be Trp or Lys
  misc_feature (533)..(533): location 533 can be Asp or Thr
  misc_feature (534)..(534): location 534 can be Pro or Met
  misc_feature (535)..(535): location 535 can be Ile or Gly
  misc_feature (536)..(536): location 536 can be Lys or Ala
  misc_feature (537)..(537): location 537 can be Lys or Met
  misc_feature (538)..(538): location 538 can be Ile or Arg
  misc_feature (539)..(539): location 539 can be Lys or Thr
  misc_feature (540)..(540): location 540 can be Ala or Gly
  misc_feature (541)..(541): location 541 can be Lys or Leu
  misc_feature (543)..(543): location 543 can be Lys or Asp
  misc_feature (544)..(544): location 544 can be Val or Glu
  misc_feature (545)..(545): location 545 can be Asp or Gln
  misc_feature (546)..(546): location 546 can be Asp or Leu
  misc_feature (547)..(547): location 547 can be Val or Lys
  misc_feature (548)..(548): location 548 can be Glu or Leu
  misc_feature (549)..(549): location 549 can be Asp or Lys
  misc_feature (551)..(551): location 551 can be Asp or Met
  unsure (1)..(576): unsure at all Xaa locations
XXXXXXXXXXXXXXXXXXXXXXXXXXXXXXXXXXXXXXXXXXXXXXXXXXXXXXXXXXXXXXXXXXXXXXXXXXXXXXXXXXXXXXXXXXXXXXXXXXXXXXXXXXXXXXXXXXXXXXXXXXEXXXRXRLXSLAXXNXLLXXXXPAXXXXXLXPXXXXVXXXXGXDIXRXXXXXXXRXLFSFPGLLAPXXXXXXXXXGXLXXLXTKNPXLYLXFPQGRMKLXGTXXYPKNXYLTLQXXXXXKXVXCXDXFXXXIVFSEXWWIGTKEEXNPXEXXLXFPKEXXXXXXXXXXXXXDFXGGAGXXXXXXXXXXXXXXXXXXXXXXXXXXXXXXSPXXXXXXXXSEDXXXXDXXXXXXXXXXXXXXXXXXXVRXSXRXXXKXXXXXEXSSXXXSXXXXXXXXXXEDXXXXXXXXXXXXXXXXXXDXXXXXXSXXXXXXXXXXXXXXXXSXXXKXXXXXXXXXXXXXXXXXXXXXXXKXXXXXXXXXXXXXXXXXXXXXXXXXXXXXXXXXXXXXXXXXXXXXXXXXXXXXXXXXXXXXXXXXXXXXXXXXXXXXXXXXXXXXXXXXXXXXXXXXXXXXXX
